United States Patent Application Publication US 2026/0058010 A1 - sequence listing, part 47

SEQ ID NO: 519 - DNA, 454025 bp, Homo sapiens
  source 1..454025: mol_type = genomic DNA
aatcctaggacacacctgtggggtagtaggaaaattggatagggatggggtgtgttatacaaccagttaccactatagacaatggagtctgatcttactaggaatttctgggaaatagtggagaacactccttagaattatctcaactaagcagctaggaagctggggtatttatacaccaactcatcatctatcagtggttaaagcctgtttctgagggcctcaacaatgaaattggtttgtgtgcagaaaaactgtactcctaaagccagagagtcccaggcagttgtgggaagccccatcagtgtactgaggtgagagctgaggggatgtgggtggagtggtaatggcatctgccacaggatttaataattcttgggtgcttttcttttgctcattcataggtactggactctctataattgtactaatatgtaaaaaacaacaatcctaaaaattgggttaggttagtggttctccgctgggggtgacttactactccctccctcaaggggaatattagccactatcaggaatcatttatttggttgtcaccactgggagagggagagtgctactggcatctagtgggtaggccagagatgctgctaaatattttataatgcacaggacagttcctcccacccccacaaaaacatatctagtccaaaatgtcaatagtgctgaggttgagaaactctgggctagattaatggtatttcacaaataacaactccaaggttaagacaagttgaataacttccttgggtttctaaacccagtgaatggcccagccaggatttgaattgaggtttatctgctcctaaagcctgtgctttttgatttatgttggtctgccttccagagaaggagaaaaaacctgaatctcagagactcactgaaaaagccccagcattagtaccggtcatggctcctgggccaggacttcaaaggagcctggaactggctgtaactggaaggaggtgggggaatgaacaccttttccatttttccctggcctctctctctcctgggcaagttggggcaggctgagtgggcacaggtcctggatctgcataccagggctggcgaggtgcctttcgctggaagtcctgactccttctcaatgcacaaggacgcccttctgctgccaaagctggctggtggttctttctggaatggcagctttccccatcccccttcaggcttgggtcgatcttctggcaggcaaacgtactaaagagttacaggtggtgcagatacggtttggaaggaatcccagctgggcctcctcccagaagccttctgatcactcaccagataactctagctgcttgcagagtcctgggaatcttagcttctccaggaaaccagcttcaagggcaacaagaggttctgaggagctagaataatctcggaagctgaaactgctttgtccttttgcttccttaggttggaaatatttttgcaataccactgaatcctccagtttttaccccttacgatgggaagtgaatacagtatgaaaagggagtgggacatatgagaggaacgacaggctcaaaatatgaagacttaatccagacacctctgtgtctctgaacttgcgttgtttcttctttggaggtgaagtacacatcgttttactccgggcagaggacttgtgctccttttgagaactttcagctctgtagtgtcgagtcttctggtttccagatccacatcctgccctgggggaattgacatccatcaggtatactgttcttggtctgtttaatcaaactttcatgatgtcggttggaatttcacatgtggaacaagtatagaaaaattaagtgattccagcagcttaagtccaaagggatgcattaacctttgatatcaaatacattaaaacatagtacatctcaataatctgttttcggaggcactgagtagtagctggttcacttgttcattcattacttcactttttttcactcattccacaagcaataattgagtacctgccaggtgctgtggaggatattaaggtaaatatgataaagctcttgcccttaaggagcttaacatctaatgggaaaagagatcaatagctatctcaggtggcaggatataaatattacaagagaaatatgaaaaagtgtagtgatgctattttgttttaggctatgaaatagtcctggcatggtgatgaggcagaaaatgtgggctatatttttaagaaaatagatactggagaggaagagaaaaatggtcttcagtctgagggataggtaaggtttgaggattatatatcagtcaagtacgcttggttcccaaataatgtaagttttcttaaaaacttcttgtcctccaattattatctctgttaaagcaacaaacttagtgtattaaatgtcaatactacgcaaaatatggcttatggacccctgctggtctgcaaattgttaatattccatgatgagaaaagtatagaaattgatgatttagtaagttacggcaatttgacaataattttgtttgttgactctaataactacaaaaaattggggcttatattttgtatatctttagataattttatttttctaatcgtttatttttattgtgttttccaaaaataacagtctgtgacacattggaaatgaaaaaagtgattccttaccatagatgatttgagaagcactgtataaatgattgcctacatctgtcttcctactaaaatataagtttctccagggcaggagctgtatttttcatgtctgtatttcagtcccaagcttatgagtaggtgcttcttaatgatttgttgaattgaatgaaaatataaatgggatttcagtcaactgtaagtaaattattttcagtttttggaaagcccatttgtatttttcagcttgaattagctcttggattcatacattcatccatgatgaaagcagtacttgattttattgttctagtaatactttcagacatcacagttgtaagtctgagttgcaatattctgttcttttgtgactgtgtacttattcaccttattaatgtcctcatgagtctaagaattgaagccttactacccttattctttttccatcaccctccaaattcagtatattggaacttttccagttttatatttttcttaaagtatagaagcaggtcctttataagttattgcctttcacataatgcccatggttttgctgccattttatttacatattcattcacatattcattcacatattcattcattcatttaccacttattcccaaacacttattaagtacctgtatgagcttggcactttactcgcactggagatataaagaataataatatccctaccctcaaggagtttatagtctactaggggagttagggatacaaatacaaaaatacaataagacattacaggtattagaatggatatatacatgagaaacagagaaggcacaatatccagagtagtcagttctctgttgtaggccaggagatgcttcagagaacagcttcatgtttcttaaattcaggtggaaatgttagtgactatttgccaaggagacagcattgctggcaaagagctggcataggatggctgttgaaagaactccaccatcaccatcaccatcaacatcatgataatcacaactaccacaaccatggccaccaccatcattatggccatcaccatcattataaccaccactaccactactatcgccatcaccatcaccatcataatatgaccacctcaccaccaccactacaaagaccatcattataaccaccactactactactatcaccatcatcaccatcatcgtatgaccacctcaccgccactgtcaccaacaccaacgtttactaacattcatcagttgcttcgtatgcttaggcatagtgctgaggaaggacctcatttggattatctcacgtaatcttgcaacctatgaagcaggcactcttagcattcccaatttataagtgaagaaacagagggatggcatggttaaataattggcgccacttcatgcatctaacaagtgacaggattcaaactcaggtttgcttgatttcaactaagcttttaagtgggtctcttgcaagtctgaaacatttagcctgatgtttaactttatcattttgataggtattttactgcccagaagctctttgtgttattggcaggcattttaggatttgattttttaagtcatctattcaaatgttaaacaagattattcaaagaacaaatctctggggaaccccaaagtgagcaatttttgacacagtgaagtatatgattatcccaatctgttgtgtcctgttttaaaatacatttcaaagccttgagatagtcagttctctgatgctatgtgacccaatgtggccacaggtatgaaatcttatcacggttttttgaaagtctgaaatattgtacattactagttatgccttattcacatcctcacttatagcaaacattaatcagggggtagagatgaggattgtgttcttcaatgattagtaagtaccaaaaactacgctcagcacaatctacattattttgattttctcagccaaaatctccatttttcagatgaaaatactgagacccagactgatgaggtaccttgctgtaggtcctgctattagtaagtatagaagccgggacttgatcactgctcgagatctctgcagagcctgcaattttataccacgactcagaaatgggagtaaaaatagaaaatagggaatttagggaaaatgtcaacttcccaaatggctctatctttcagaagtgcttactttatttgggcctaattttcaaaagcctgtagaaacaaggcagagaaaatacacagaatcattgcctgtgctcatgagtctctgagctacttggggtgtgctggctaccatccctatggtttcataatgcactttccctctctcaccccacattcagacactgctccaaacaagacaacctgtctgttttcctgccacaaatgggtaaagttgtcgacttactctatcttgacaattattgttttgaaagaaacttctaaaagtttaatcacagagaatgcttagtcactggatacaatttcaaagagaatttggaaacaaaataaatagtcttgccttttctaccccataaggtgttgtggggcccaataggatacgttaatttttgaaaatgatatgcctttattcaaataaatgtaggaggtgttaccgggtcttgacttttgtaccttataagcaaggccatcttgctgcagttgctctgaaagaagataaatgaagttcagccagagatgctgcaggagaggaatgtatggtgggtgtgttattgatgagatatgatggttttctagttctgtgacctataattttcttataactctgtgcctcagtttctctatttgaaagatggagatattaatagaaactgtccctagggttactgaaactattaagtatgctaatacgtataaagggcttcacacaggaactacctcagagctgccacagcagaaatgttagctcttttattgttattctccatcactgccttgatccacctgcctgaaaatctcatctacccagaacagtgagcctcaagttgtcaactgccctttagcacaacttctgatagaaggctagaaggctagaaggctgcctggttgctgaccaaggattttcttttgcctcttaaaatgctatcattttctctgtgtaaaccataaacacattaacagaaaacagggcctcgttcactaggctgccatgagcctagctcccagcagcagcagttcctgatataacaaagtggtttcaccttacttaggtagaaaagattatgttgatttcctaagtagaaaactccaaaatattggccagagtgctattcctctcatcacttatgtcttcaggtctttctgagggagaaaaaaaaaaaaaaaaaaacttgaaaagaaaaaaactcaatgtttctttttccgccagattgcttctttaattggtgggtctgagtgtggccccatttacccagtggctgtgctaaggtttaacgactagaccagtggtttgcactagcacttgtcctagttatttgacactttttgctgtaggtcaaagtgagtagacattctggttttgcagggactgtccccagtgaattggctcaaagtgtttctttttagccactttatgatgtactgtggccctttaattcccacctagccccactcagactgcagacatgaagtgattgcttttataaaatgttaattggaaggattaaacaatcatctgcttttttcctttcttttttttttttatatggaggctgaaataaaaaccgaggaggtacagggttgctggtaattgcaacctaaaaaggctggggattctgaaaaaccatactacaacataatttctataggaggagggggcacagctttggtcaagcctgtttggagaagcaagagagtgacttattagagcatgttgaaagttaagaacctggggaaacaaactaccaagccagtgttaaaaaggaagttaacccgatgaaggcactcaaagcagggcaaagaaagtggctagtggaatataaagttccagccttgacccttactacatagttttaaataaacaccatgaatacacctttgttgataattattttccatttgacttcctacattttgaatgtaatattagccaatggaatactagtattctagggttagaagaatcattggaagccatctagtcctactccctgttgagaatattttgagggcatttgtgtaggccaggctgtagctgtatctcatccatgtttgttataatgagatctgggaatttacactggaaactctttgttcatttgcaaaatttaaattgttcttgattaggttgcttcccagagcacttttatataattagaataaaataaattgtggtggggaaaggtgcttatacatcatcattggattacccatctgcctttgagatgtggctgtgtaaatggttcagctgtgggccacttgccatgttggaaactggtgtattgtagtgtgtggggggtgggtgggggtaggtgcctggcttagtttagatattcatgatcagtagaagttcacaaaatgtggaattaactggtaatcattgtgtaacttgtgatacgctttcttgggctggacttctgggatttcatatggcaggaagaaagaatcacagcctaataacagtaacaataatattcttatatggcagcaaattttactgagtgcatactgttctctctatatgtgtgtgtatgtgtgtatgtatgtgtgtgtatgcatatacacacacacatatatacatatactgtgtataaatatatgcatataattacgcatttaatcctttatgacatttcatctttataacatcctttaaggtagaaactattattattctcattttacagatgagaaaattgaggtatggaaagattaaatgattggacaaggttattcaagcccaagttagatggggtcatattttaaaaatgtagtaaagcctccattcacaagtagatgaacttggaccacaaggagataatgtggttttctcaatagcagaggtgaaactggaacacagatctactccttgtcagcttcactttcatatgtcactccctccactctctgctggctaagtgttaagcaaggtgatttctaagatctttcagtctctaagctgatatatttctgagtcgagcaaacatgaaatttaagtgttgtcctggaaaatccccctctacttaaaccttttcctttcaggggataggcgtgtctttccagaaatagagttcaacagcatcaagctaccatcatccaatggaagtgataggaaaaaaattacctagatgactcatttatcttgtgaaccatggactcataaagaagaaaacacatagcaggaacatacatatgttattacatgctgagatagtaaggttaaagaaagttagagaaggtaagtttacaacagaatggaataaactatgcagataagctggaagtactatagaattctccaaccatctctccttcagtgctaggagtctgataattacatcaaaaccagaattatttgcatgcccagacatcttcatggagactgccctgtttgtcttttgttagtctagctcagtggtccttacacttaaacatgcctaaaaattattgtatagggctgtatatacacaggataatgtatgctgtcatgtgtggataaaatagggggctttgtgaagggtatttttgactatatgaaattttcccctgtaagtgcaggctttaaaacctaacaattggaggagatgtatgcccactttaaatctacatgtcaaacttattggcttgtgaattcagtaaaattaatagcaacaggaatagcaatcattaccatggagaatcatttagtggggtattttgctgttgcatagacgtcatcagagaggacataggaatcttaatagcatctgtcagagaattcaaaggtattagatttagggctttaaaagtttatgattttctatccagtcaactgacccaaatattatcctcaaacactcttggatcattgaacatatgttacatctttcatgaagacttctttgacttaattgcttcttttgtttgttcgtttgtttgtttgttttgtgagacagagtcttgctttgtcacccaggctggagtgcagtggcatgatctcagctcactgcaatctccgcctcccagttcaagcgattctcgtgtctcagccaccccagtagctggaattacaggcatgcaccaccatgcctggctaatttttgtatttttagtagagatagagttttgccatgttggccaggctggtctcaaactcctggcctcaagtgattcgcctacctcagcctcctaaactactggcgttacaggcatgagcttctgtgcccagccttaattgcttctttagtgctgcccctgcacttaacacagaaatctgtagaagtgattattctcattgtatgttaagggcttatttgtggatgactatcttctcaagtatcttccaaggtagaacatgtgcctttttagtgttattacctcaatttttagtagagatggccaactcgcatcatttgctcaataattatttattgattgactcgattaatccgagtcactatagcattctactttctgaggaatgggaggactacaatcagggcctaagcttttagcatacactcagtttgcattgtgctaaattttctgttaaaaagataacatctgcctgccccaataggagctggagatttcaggcatcctgctttgaccagttggtttatacctgaaaggtctctctgtagagctttggcaagaaaacctgttactaagaagaggttacaatttctttctctaatgtgagttgacattagggtctgatttgggccagggtctgcctctggcctatagatctcccagaaagaacccatgcatattttgtccctaaagactgaattaccatctctttctccctgcagagctaagggggcattctgggatgcaggtggtgctcaggaattttcagcttttcttgaggatctgaaattgcagtagtatcctttaggttgcagtgggtaggcagatatctttacctgttggctctgaaaagccagatcatctatctgatgaatgacctaaagtcccttctttcatatattccctttttaacatggtgacacttttctggcttagagaataaatgaaaaaaaaaaaaacacaaaagaaaataaacaaaacccaggaattcagcaatggaagagatcttggtgattatagggtctggtaacttttttcttttctttaacttttcaaaaattgtaaaatataacatacatacagaaaagtatataaaacagatacacaataatgtgaataattataaagccaacacctatgtttcacactgaggttaagaaatagaatgctgccagcattttagaagcttcctgtgtttccttcaggatgacagctttctcccttgaccctggagggaatcaccatcctcaattcaatacaatacaattcaatacaatcatctctttgatcttctatgtaatttgactatcaaattggcatctctaacattttctttatgtaaataggatcaaattacatacgttgttttttcatcaatatatttgtaagattcactcatgttattgtgtgtggctgtcatttgctttcatttctctttagctttccagttggtaatgtaccacaatttatatctgcagttgtctcttttttggttatttcagcctgctgtgtagaacattctttacactcatcctggtgtacatgtgtgcaagtttctgtagtctagggcatagacccaaggtggacacgtttatattatcaaactgttctccaaagtaagtgtatcagtttttactctaatcacattctgggcaacacttggttttggcagaccttttaatcttttgccattcttatgaatgtgtatggtagtggtattggtattctgtggttttgactttcatttccttaattattaatgaggttgagcacttttccatatgtttattgaccatttggacttagtaactgtgaagcgtctgtttacgactttttgcccatttgtatttggttttctgtcttttaaaatttgatttttagatattctttaccgattctgggattgtatgcttttcagataatttctataattctgtagcttggtcatttcacttgcaatgtggtgtcttatggtaaactgaaattcttaattttaatgcagtcaaatgtatcagtctttttcaatatgaatattactttatgcatcttgttcaaaaaattatcctctaccccaagatcatgaagacctactgtatttttttctaaaagctttatagttttgtctttcacatttggctccataatccccctggagttgacttttacatacagtttgagctaggaattcattggcatttttctttttccattataatttattaaaaaaccctctttcccccattaatttgcagtgccacttctcataaactaaatccatatatgtatgtttctgtttttgagttctacggttttatttatctacccttgagccaataccacaacgtctgttactgtatctttaaaataagttttggtatctggtatacataattctcccaccttgattttcttcttcaagattgtcttaaagaagatacttattttccttttgcacttccatagaaattttagaatcagcctgtcaaaatcctcaacaacctattgagttttgactggaattacaatgacttttaaaacaatggtgaattgacatttttgtaacactaagtttccccatccatgaacatggaatagctctcttctttaatgactgttaataaggatttccagttttcttcatagtagtctcacatatcttttgctagatttattccaaggaacttgatatttttgatgctgtactaaataatgtgatttaaaaatgttattttctagatttttatcaaaggactataataatacagttgatttctatatattgagtttgtatccaacaaatatgccaaaccctgttatcaattttaataatttaaatatagtttctaaggggttttctacattaaaaattgtattacagttttgtttctttccaaactttatagctctaatttcttttcttttcttttttttcttttcttcatgttgtgctgataagggcctccagttcaatgattaatagaagtgaaagcaagcttgcatccttgccttttttctgatctcaaatgtaaatattttaacatttcaccattaagcaagacatttttgatgtagatttttgtagctatcctttcttatgataaggaagttatctctatacctaatgtgcaaagaggattatatataattttatcatgaatgtatattaaattttgttgaatgcttccttttgtctgtgagatgatcatatgattctttgatctgctaatgaagtaaattacattgatttattttctaattttaaacaaaacttgaattcttgggataaagccaactcggtcattacctattatcttttctatgtattgctttagttaactaatgattttgctcaagattgctttcctttttcatactgaattgttttgctggcctcatcacatgaattgagaattgtctcctcttcctctcatttccccagaacagagcataagattaaagtttttttgttgttgttttttcttgactgtttgggtctagatttttttgtttgttttttgaatgtgagacttttttagtacaattcaatttctttaatgcttatgagatattcggatggtatattttttcttgtgttagttttagtaagttatatatattcacaagacatttttctattacatcaaaaagtttaatttattggtataaaactatttatagtattacttgattatctttgcgatgtctgcaagatttgtagtaaggccttattttttccatttatgatataatggtatcttttttctttttaaaatatcagctttatcagtgttttattaattttcttagtcttttcaaagaaccaatcttaagttttgttgatagtctcttgaactatttgtttcatattttattgattgctgttcctatctttactctttcccttctttatatttcttagggtttttctgatattcctttcttaactttttgagagatatgtttattttattgattttaagcctttctactttctgaataccatacttcatgtattataagacaaacattttacacattttaacatctttgaaactgagatgcatcttgcaactgatggcatgtcgtgattcagttgcaagcattttcttctcattgtagtacataaattattggcacatcttacaatagatactatcatagattcaataaaaggaagtatatgcagttgaggctattactctcccttcaagtggtgcttttgcttggtttccacaagcatgttttgttagcctcttctctctcagttctatattttggatagtttctttcgttctttttttcagttactcttactttcttctgacatgtgtaatgtgatgttaaacatgttcgtgtaatttttattataaatttttccagttttagaagttggttttttaaatgacaatgccactcattaccattttctattctctgaagtatttttaaatttatccttatttatttaaatacagtaaacagttgttgttttattgtctgtgtctgacaattccactatctgaagtctttttggtttgtttctattctctgtagtttcttctggctttctctcatggagttttcttcctttgtgtgcctgactatctttgactgtgcttgtctttacaatttaaaaacatttttaaaaacccaagaataatatacatacattaaagtgaacaaaactttgaattgaatatatccaatttcttaagactttcttatgacctttcctagtcaatgccatcatcccctttctggtaaccactattctttcttcaccatcgtgaatctgtcctgctgtagtagaaactatatgtccagatacagtagaaattatttgtaacaacaatttgagaattgtgattggtatgaggaaatctttcagaagggattttatttgttttttgggtatatagggaaataacaagttcaaatttgttattccctagaccacgcaaaggacataaacccaggctataaatacatgggaaggctacttgaccttcaggggcccagtttcagaggagggtgacttactagagaacccaccttgggcagaatctgcactttgacttgcgtcacccgcaagtccacaaaaactgcagttccgatttgtagcttttgctttatactggcaaatgcccttaggacagagtaactttgaatgttatctctttgggtactgcctttttctagatgttgtcccaggaatttcttactatttattgttctttaatatttcaaatagactgttttgttttgatgttctatctagttttaaacattgctctcagaaggaggtttttctgttgtaatggtatttatttatgttttaaactttatttcttttgagctgtggaaattttttctgaattttaggcagatttatgatatataaaatccataaaaggagagagtcatgcttaaaattatgcagatgttagtgggccatgcatttctcctagaagccattttctttctgggattagggactgcttcctagtttctgtttgtatcctgagaggtctacatttgtttggtttgttgtaccccaccctctatcttaaggatcttaaccaggccctctgagtggtccggctatattacaaaatgaaaaataaattgcccaaaagaatcacaaatatggtttatttaaattgtctagcaaattaatacttggatgaaaatgttgtgttcattccccttctaaacataaggcctggatctaacgctctccacctaccttgataggtcctctcttaacttttgatcacttacaatattcttttgctggtcagaaccctagtcattcctcattgcctccagaaagatgaatttatataccttgccaggcatgtggtcctttcctcccctctccttccctccccttctccttcccttttaccttcctccttccctttttcccttcttccctccctccctctcttctttccttcctcctattccttccttttagtaaattattgatttttgccattagtttcagaaactagttgtgattactaatgtgtcctagctcccctgaggctctgctgtaaaatagccagtgaatgaggattttttaaaggtgatgagttggccagtgatgagggagggcgaagagtggccggtggggtggggtggggggacacagaaagcatacatgtcttgactcagtgtggttgatggccagaacccattttcaatcctatgaaatcagaggtagatttaccagacattcttgcttcataaagtaggcatgctctgtgctctttgcctctggatttgagtggaatccaggcgggtgtgtaggaatctttggtaacccattagaacataatctattcatgtttttctccctcctagcccatttaggagaagaaaaccttggtttatttctctctcaagtgaggaagataaagaacaaaacaaataaaactaaacacacatctgaattccagtcactaaaatgatgacttggagttttgcaaacagaacaagtctttgcatggacttgagatcttggccatggaatcaagactgaggggtaagctttgtttccccagtcaactcacatatacgtagagcagcatttctcaactcagcttttttataccagtactctactagcaaagaagttatagtcaagttatattttcaaagtctgcattatgacagcaatgcatttcattttctaaatataacactagattataatattgattgtactttttcaaaatactcttcatcccccaccccactcctatattgtccctttctattcctcaccctctgatttgaggatcactgaacaacatcattcagctgtcctacttatggtgctatgaatctagagccaattctggccaagggtctcagggtattctccaaaggaagttcaacaacaatctttgcatgcaatatgaattaaagtaggagaatttttgttttgttttgagacggagtcttgctctgttgccagactggaataaagtggcatgatctcggctcactgcaacctccgcctcccaggttcaagtgattctcctgcctcagcctcccgagtagctgggactacaggcacgtgccaccgtgcctggctaatttttgtatttttagtagagatggggtttcatcatgttggctaggagggcctcgatctcttgaccttgtgatccacccgcctcggcctcccaaagtgctgggattacaggcatgaggcactacacctggctggaagaagctaatttttgtctggtgtccagtggtcagagaaatagacaattggcaaatgagaagacaatgtccaaaaaggaaatttttttccaagtcaagaaataagctaaagcctagaattcatctttgagattcctcagtgcctaatatagtgctggatgtataagtggctatcagtaaatatgtttagaccaacaattcaaattccctgtgtggacatacttgatggatcaccctgtggctatggtaggagatgttggatgaggcagcagcagcacagaggaaggaggaataaaaccagccttggtttcaaatgtcatctccgcctcttattacgtgaccttggaaaaattacttaaatcttctttgtctcaattgtgtcactgtaaaagaggaattagaatacctcacaactttattatttataaaaattagaaatagtgtaagcaaagtgcttggcgcatacacaactctcattgagtggtggctgctactattattggaaataaaagaacaagaatattaacttaagaagattttactagggaaaagcttctttaagcaaactctcttccaaatccgtgaagcagggtctggctttgccccaagtttttgaaacacgtagccttggtgtgaactctgtacccagtccttttctgtaatccctgtagaccccaagttctgctgaccccaaagtgccttagtcataggggaattaataggacatttggccaaaacctccaaatggagatcttccaaggacagaacattctggaacccatagtgttttatatattcttctcacagtggctggggtcaaaacaaagccagaaggaaaactgtgttaggagacccagatccagacccaaagaaagaaagttaagaagttttcgaatttgcttgttgtaaatgatatatcttggcacctaatttagctttctcttggcaaactggctggtttattagtagtgaagttaatttgaaaaatgaaataacttccaacaagttaaaaagtaatgctttaaaaatttcactgtattaattttaacattggcttttcatgttattacgttaattttatatgtgatggttcaagtgaaaggagttgttctattttaaatatgacattctatttgtgaatacaattctggaaatattgggagaaacgtaattggtaaaagtattttctattaaattctctgggggtggtggtggaatgttttcttaaattattttggttagagggcaaacactgtcttttaatgatctttgaatcagcagaacttatttagcatagagactgacatacaaaagttaataaatagatgcaagaaaaactaaaacacagcatgaagtggtggggagaacactccacacaaacccagaagtctttccctttggcctcagctctatcactaatatgctgtgtgatggagacaatcacttaacctttctgcagcagactctttctttatgctgcaaggcagaggagtgaaataatagtggtcttaaagagttgctctgcttgcctcatgtattagtccattttcatgctgctgataaagacatacccgagactgggcaatttacaaatgaaagaggtttaatggtctcacggttccacgtggctggggagacctcacaatcatggcaaaaggtgaaaggcacgtctcacatggcaacagacaagagaagagagcttgtgcagggaaactcccctttataaaaccatcagatctcgtgagacttattcactgtcaggagaatagcacagggaagatttgctgccatgattcaattacttcctaccaggtccctcccacaacacatgggaattgtgggagctacaattcaagatgacatttgggtggggacacagccaaaccatatcacctcacaagaacagcatagggtgcaaatgagacaatgaatgtgctttgtacaccagaatatatgacataaatcatgacaaaaaatatagaactctttgcagttttttaatttcttaatcaagatgccttcggagaagtcaatcaagttgggaacagctaatattctcacctaggccatgctgtatcatgacataaataattgtaataacattgataatgacttatttattgagcaattattattataagccagatcctgtggtagacagattacattcttttcatctttaaaacaaccctgtaagtcaggcattgttattattatctttattttagagatgggaaaacagaagctcaagtcatatccatcactttgtctgtctgactccaaaagtcatcctcttgccactatgccatattgcccctcataaaaagttttaacaggctctgagcaccactgtgatacaggtttctttacctagcagatttcattgaatcctcaccacaacaaatgaggtagagtattattattgtccccattctacagttgacaaaactgaggcacagagggcctaggcaatgggctctgtctgatcccaagtgtggctgtttttcctacacaatgttagagtttacaatacttctttttgtgatagtgtagaaacagtggggcaagaacttaggcataatgtgtcctatattcctccctagcaggtgacatttttatttgtagaaagaagttaaggaatagcaatattgagttccagtgggagcctttctgcaaggcagaggagggcctaaagctaatctcagtggactttgtgaaggatactagccctccgacttttgatttgtctttctgttttagagaaatgaatgagttatgaatcttactccccaagtagctgcacagagttcaaacctagacttttgtgcagcaggaaggcaagcaccggacctatgtccaaccaatcacaagctcccagggagccatccctttggaagagagggagcgtgggaacaaacaggcctgatgtctgtcttttatttttactataatggagtctggtgttctgtggaagcagcagcagaagtggcatagagctgatggaaggaggggtggcaggccctgctatagagatttaaggcagaccttgccattgactgcttggcagtggtgaggattttcttatcctggtcttggacactgctactggaagcctaacgttgatctatgaatcacctaaaatctgtgagctatctatacctcttgattaaaatagccagaggtttctgtttcttgcaaataaaacccatgcctgattcagtagtcatgcagttcagtcaataggaagtctcatccacctccagagactctggcctccaagtgtgcactgatcagggcattggatcagtcttctccactgtcctgggcaccataataagaaaatccaagttctctattccccagagtgctcctggcatccctggtgtactggcttctgagagccaatagttaaatttttaggaattttatgagtccattgatatttctggtacagcagttccctcatctccatgatttcactttccttggtttcagttacctggggttcaaaaatacaaaatgaaaaattctagaaataaacaattcataagtttaaaattgcctgctgttccacgtagcatgatgaaatctgtgccagccttctccacccagactttgatgtgagtcatccctttgtccagtgtatctgcattgtagatgctccttgtccattagtcacttagtggcctttgcggttatcaaatcaaaaagacacagtagaatcatgggccacataacgaagtttcagtcaacaatggaacacatataggacagtggtcccataaggttataatactgtatttttactgtatcttttctatgtttagatacacaaacactgtatcttttctatgtttagatacacaaacacttaccattgtgttacagttgcctgcagtattcagtacagtaaaatactatacagatttgtagcctaggaacaatattctgtaccatagagcccaggtgtgtagtaggctctgccatctaggtttgtgtaagtacactctatgatgtttgcacaatgacaaaatcaccaaaaatttatttctcggaacttatccctgtccagaagcaacatatgaccgtatacatagggtttggtactatctgcagattcagacatccactagaggtcttggattgtatcccctttggataaggggggactaatgaagcttaaaatcagctatggttggagtattcacatcctagaaatgggcaaattctacacatcaggcctcccacacctcccagtccattgttaatttaccagcacattactgtcctgatatcttataattttgagctttttgctacagacttttaatgaaatgttctgctaagcctcattcaatattgataacatttgctaagatttttactatgaattaatctcaaataaaaaaatataatttgtaagaaccttgctagtgttatttgctaatcccttcaactgttgagaccccttcaactgttctcctatctgatccagaagaaatgtcactttctctgggccttaactgacccctccatccagaatcaattactccatcttctgagccatccccagtactaggtgcatcaatgcacttgcctcattattgttcttagaaaaacatttacagaatgcttatacacattaggctctattctagtgctttagatatagtaagcaattactgaaacctcataaccatccaatgaggtaggtacatttgtatgttgctgaattgggccatagttcctcagtttctatttagaaaataaggtctcagtttcagctgattttagtgctaaagttttagagctggggctgtgatttagggaggagtggggacaacaaagaacagagagggaaagccatttgataacaaagagatcctcacttcaaggataaccagttcctctctactacaggagatatcttctggaacattaaggtgtgaagaggggagactaagataagacttaaaaagagtaggctgcactcattaggaatactgtatttgctgggctgtatcagcagcagaggcttctgaagaaatgggctctctcagttcgggcctttgaaccctactcatcatccataatcctactcaaatgtcactgtctctgggaagccttctctttctccctaggcctcacctacttagcagattatcaagggcattgtagaatccatcaaagcatctgaggctattgttgatacagccagaactcagtcatcacttgctgaacacttgagtttaggccaagaatgagagagatcttggagaatcttcctggggtggttcttcaaagaaactgcaatctttgcctgcataatcacctcacttctccacctggttatggccatgggaacatgaccaccatgtgctactagaaaaacttgcatccatctcctatcacatctttttttccgcagaagattactgagattgtgaagtatgaaatcatgcttcacccaccaccactccagtgatggatgtgccagcgtatgtgtgtgtgtgtgtgtgtgtgtactgctgaactgtcctagtgaagtcccatctcaccagacacctctctgtgtatcatgtgacagtttcttcgtttagaatacggggccagagcaatgtttgccatccaggaagctgtggagaagagccacaacgtgccaaacccaagtgagcatgctaaggaacaagcagtgataacgttatcccaggagcaaagttctggtcaatttagtctataattaggtcaagttctctcccacttccacctctggtgtgtctctaggaaataatttgcctaccatggttatgttggggcagtctctgttcttctggacagccttggggtgtagcctatgaaataggccaggatgagcagtctgtatgagctcttggctcattgtttaggctcagtaatagcaaccacatggcactgcagaggccttgccatgcctggagggcttgggccctgctcttatccaacaagatctgactacagccagactgaaagtgacatggcctgcttagtaaccttcaatatcctcttacgggattctctgactcagaactcacagacaggatgtgatctcagctcctcacataccttccaggcacatgggcatggttgcatgtttcctccagttttaattggggtgagaaaaaatactaaacatgtgtgtgtaggagaccaagaggaatttcttagggaggatcttgaagatccttggggagctccagaggacagagcttttgcttcctgactttttgctctattgtctagatcccagtaatttatccagaggtaactatgggcttctggctggtctccctgccttgagtctcttaacccctcattatctgcccagaaatgttagagacaccaccctcaagcactgtttctttctgtcaaaccaagtcttccctcccacatccattctggtcagcaaagttatctattaacttacctgtattccatcttccctacctcttaccattccttccttttgcttctctatggcccgttggtcagtccccttgtagttcacctcctatagctcaccagttcttccaactcaaagtggaatttaatccttactgggaaggcttgcttgttccacagagaccttcctaaaaatactaccatcagcaccagcatcactaccatcatcgatttagcacatccttcatgccgggcattgtgtgaaggaccttacatgaattattccatttaatcctcgtagtaatcttataaaatagttactattattatttccactttatgaaggagaaaacagaggatcaaagagattaagccagtggtcaaagacctcaagcgtattaatttctagctcaaaggtttgagtttagaattgtgtgacatcaaaatggactcttaactgtgatgatataaagtttccctatccaaacccatgtgcttattttctttccttgaattccttcagtgtatatgtttaggatgccatctttgggcatttgaattgttggagactgggaggaattttttaagattagatggtctaacacttttttttagtagttgataaaactagcctaggcaacataccaagaccctgtctctacaaaaaatagaaaaattagccaggcatggtgacacacacctgtccttccagctacttgggaggctgaggcaggaagattgcttgagcctgggaggttgagactgcagtgagccataatcgcgacattgcactccagcatgggcaacagagcgagatgctgtctcaaacaaacaaaaacaaacaacaaaaaagacaaagaagaaactgaaaattagaaggacaaagagacgtatctaggatcctgaagtggattaatggattcttgactcaggcacaatgcagtgcttgttgtagtataggatatatcatcccttttgggacttgaaaatttactcttcacatatttttaaattctatatcttgccctctcaattacagtattagttatttaaggatagagagtatgttttctacttaaaaatgtttccaatattatgtaaaaagtagaaactaagtgttaaaggcaagcaagcaagctagttggcagagagggagtgcaaatgtttacatggtggagatgctggtagtccctggcacatagtaatctttcagtaagtacttttcaagtgaacgaatggatgaatgaaatggtgttaggaagactagagttgaatttgaactggggggcgggtatttccaagaatacagatgaagttttgcaacaaaggaagtagatccagctttggatgctgctgacaaactagtctttaaagaaaattacagcacgtgtgtataaagaggtgagtcactggagaagagttattgaacctgacagacattgtgaagagaacagcaatggtctctgactgttcagcaagaacgctgaacatctgctcagcatcatcaagaccgtcttctgcctactaactggtgggatgtgcctctgtgccaaacgatggcctctcatgttgggcatcattcatctaagggctctgaaagctgtgattattgcagtgggtgaagagacaggtgtttcaggcatgctagtgtaaaatattatctagatcagtgcttttcaagctttaatgagcatatgaatcatttgggcatcttgttaaaaggctgcttctactgtaataggtcttgggtggagcctaagattttctatttctcacacactacaaggtgtgatgagaatgatgctgatgctgctgttctgagcaaccatactttgagtaataaggttctagctgatctatggaaaagtactagggaatgtgacaattagaagtagttctatgttgtcctttcagctttgtcctctgatcaggaatctccactctgtgggccaactctccaacaacaggctggcaatccaattggttggttatgctgcttctatagggactgattggatttgggggtcatgaagttattaagggaaaaaaatcaaggaagcattaaaactcatacttcctagagtgttacacctaaagatctgcacaaggactcatttgcttatgaatcacttagaaattcatgtttactcctagggcccagcacagagtaggccatccaaaaatgccaaatgaatgaagaaaggataaagaaggaggcttcaatcaaagcagctagagtcataccacatctcactattaatttcacttacaagatgaagaactaagccaaaaaatcacctatgtaaacaaaaatagatgtctcaaaggccatacattaactcttaggcatattacttctggagaagttctaagtcaactcagagcctatttgggcttttatatttttaaataaaagagtgaaatagtttattatcatataaacagagtgatgtgatttctcaccttttgtaagattttatagtttgcaatgcactttaaaatagctttattgagatataattcatatatcataaaattcacccttttaaagtgttatttgtacctattttacaacctattttataaagcttggctgtctatagtagaagggaagaggcaagttagaggggtttggagagaacaagagatagatataggcaggcaagggcaaaagaataaaagacaagacaaaaaatattaaatgaagcacagagaagtactaagaaagctcaggcagtaatctggaaatatttagtttagtggaaacctctttccaacatgcttcaaaatatcccaagaagatgagtgtatacaacccagtataataatggatgttcatgatggtgcccttctagctaattctagttgttacattccctagtacttttccatagatcatctagaaccttgttactcaaaatatggttgctcagaacagcagcatcagcatcattcatgatggtcagttgtcaaggaaaggataagttatactccacctactcggcttaaaaagccaaggaagtctgtgacccattaagacattttcattacaaaggtaatggtgatattttgtcaagtgttgggtgctttaaaaagtaagtcctcaactctctccacaatgagtcagttcatggggattccagaaagttgatgttttatggtatgggctgagatatgtgaccagaggtcagccacatgcacacagctctgctgactcaagggtggaggtcctcaccaagcactgccatgtgcatgagtgagggcatctgggctttcaaggcacatctttctcccagggacaacacccttccttctttttttggaccctgctgtctcctgagatcctcctgagcataatttaacccttgctgggtgagaatcagaatggtccagcaagcgctggattttctgtcagagtttccttcggtttaaaaatctgaaacttgtttgtccctctgactcttcccagctgcaacgaggtacaaacacaaggagatgcaactcagaatgccactgtgcagagctctcttagttttgattacacaacacattttctagtttctctgagggtctatgccctggccatattaggcaagtcactttctgagctttagttttctaagtttcctcatctgtgacatggagttgcagcatctgctctgggcacctcacagggttagtgtgaggtctattaaaatttttaaaagataaataaaatgtagagagtgcttactatttcttcaggcaccatgtgaaaggctttgcatctatttcattataatacttggaagtcagtatttttattatcctcatttcacagatgagaaaacttcagctcatagaggtgactggtccaggatcaccatggctaagaattggtaaagactgagtttaaatacaagcccttccattttagaaattaaatgagataatgcttataaaagtgcattgtaaaggtctatatctataaaggcctatagaaatatatgagattaatactgtttctagaattattttacagaactaaattagagtccaccttctaccttcatcttcctagcttagccttcctggtcagccccctttccaggccacagtgaacttcatgacctccgagtctcttgtgctgcttttcctgacaatgctgggccataggcatctctggctacaggatcttagagatcatgttggacttgaatctttgacattactgatattgatatatcactggtcttggcctgaccccacactggggagaaatgcttcttcctaaaactttggtaaggaagcatcccaaatgtttgctttttcatttcctatcacgggaaaatgcagcctcattgtttctaggatcaaaataactggattatacctcccaaagattcccaaaggctgctatttcttttttgagtaagaacttccactcgcaatgaccatctcagattgaaaactgctgcccagcatggaacatgctgccctgggcctaatctctgacactccagtggtaggaagtaccatgctgatggggtattctcaggaatacttgaaaagttccaggatttgtgaatatttatttcatttctagactggccctttaatgcaaaatgtccatttcctttggtgtacttgttctacacaagaaaaaaaaatcctcagcctcaggtttcttcctggctacttcctgtttctttccaatggtcaaatctagtcatccttgctctggtgtatgactcagtctaagagtatctctgtgttatccaagtttatccagcttataaacataaattacttctttttcaattacattttacagacagtatcccaaacttttagtatggttttctatttaggctcagagccaaagtgtttgcagtcaatctttgtgcttttgattctttttttagtcgtttttgacttctatccattaaaacctcttattataccatttttttaccagccatcatcctcataagtctctgacacaaaagaatctttctgcctgccacagccaattcctgttgcaacaccgtcttgaaaggactccatcagctctacaccctcaccatttcccttcaaatcccacctgctccaagtgttttcttcttgcttagacttgatacatttgcttctcagataaaggatggtggtgagcacacagctggaaccaaggaagaaaacagggccttcgggatgatagcattacttttctctaatcaataattcatttttaactagaatgtttgtagaaattgagacttggccttaagtagtttttcacaagcaaaagaaaatgagagaagtctaaaacaaaatacagtttgggacatggaccaaacaaaatgaaaacatcttgcagagcgataaagactgtgtaaacttatttatgattcaatagaattgcttttgcaaaaagcaagggcatggctcatgttttgttttgaaatgtatctgtattacataaacacagtaattatggcctttgacttgtccttgtatgaatggaagtaccctaaaatcttacataatttgaatcctgcagtttatggaaggcaaaggcaataaggcactttatcacagcaaataaaatgcctcacaaaggagactattgcctattcacatgtggacaggtctcatcttcctatggagaaatttaccaggatcaggaatttcaggaatgactaactggcttctaacgtcctgagtgtccataaatgagaataatgcactctcccccacccctcaaattcatcttttcttccctgccagcctacttcctgctttttctgctctctttcccatgtccttactttattcttttcatgctcacaggggctcatgtttacttgctaagcttcggccttttccacattcctcctttgataggcgaacatcccagcagctcccctgggtcattcccaggtgagtccaccagacttccacagcttcaccccgtgccctgtgtcatcatgactaaagctgatctgatctcagaagtctgagagccccaaggtctgaggaacttgctttaagttcctcctgctcaaacccatctcagctggattcccagacctcccctggccatcttggctgtggaggtttattccctttatgtatccctaacacacacacacacacacacagtcactcactatattattacatattatatcattatatatagtaatattattactattatttatattactactaccattattaatatctattattatatgtatataatacatataatagtaataatataaatatatatataatgtaatatactaataatataaataatagtaataataatagtaacaatataaatatatataatgacataatatataagaaaataatattatattgttataatattaccataagaaggccttgctaggcattggcaagttttctctttgttcttctgtctctctttttgtgtctgactttcaagagcccacacctgccccttgactcatataaaatatccgctaggaagtagtattgtcactttagagtaaatttaaaaaaaaattggggggccgggcatggtggcttacgcctgtaatcccagcattttgggaggcaaaggtgggcggatcatgaggtcaggagattgagaccatcctgaccaacacggtgaaaccccgtctctactaaaaatacaaaaaattagccgggcgtggtggtgggttcctgtagtcccagctactcgggaggctgaggcaggagaatggcgtgaacccgggaggcggagcttgcagtgagccgagatcacgccactgcactccagcctgggcaaaagagcgagactccgtctcaaaaaaaaaaaaaaaaaaaaaaaaaaaaaaaaaatctgtgaatatggagaggaataagagcttgaagttcaggaaatgtttagaatctgagaatgtagtccgaatggggatggggagatagaaaaacagggagagggggagttggcttgaggttcccctccccttactcccacccttcttttccttttcccagagttctcctccaatatagctattattccaacatacagcttttagacagccaccacctcctcctgtcaatgcagtgcagactctgcccagccccccaactcacccccccaacaaaattaaatttctttctaaaaagcaaatgtaaactgatttgcacagaaggggagaataatttaagaaatgaatttattatgcttctactggcatttctactttaaggataaaggtttctttaatgatggtttcttgagaaagtatttgctaagaccagctcctgtttatgaaatagaaggttagtagacaacaaagaccaatattctcttctgatgaccgtaagaatggcaggacatgttatttgagcaacaaaaaatgaaaataagtctaatgtggaggtagacacatccatcgtagtagtttgttaagcgtttttccttattataggtgtgctggagttcaggctagagtgtgttctatgtacgtgcactcatggacttgaatgtcatttcttattgttgctgttgatcactggccatgggttctctctgtaggaccactagtttggagaatttagtttggggaaggaacttgtggtattttctcgcagggtgaaaaggatcttacattaaaagattatatgttctaagttttaactagtctttactaggggtgacatgcttctgacagtttggatgacttttaagaacttttgcaaggctgctataaatatattttcagtcatattcatcatgaatattcctatacccagaaataagtttgaaacaaagagaagtattttgtcattaggtggcctcagcaacactcactctttactctcctaatcaagtctggtctgcctcacacacaggtcttatctagacttttctctctatcttgatttagctgttggctctgcagatcctaatgataattgagattaatctttaggatatttgtttactgtatatttaggaactgctaagaaaacagccaatttacaacaaggtctgcatacaagattttctgtctatatggcattgaatttgtcacctaattgtctccataggaagttttatctaaaagcaccatggtttattccagtgacacaggccttttcaaactccagtttgacaaaggaagctctttttttgaaatacaaaagcaaagcaatcaaaaccataaaatcaatagcatgtattttcttgcagtgctatcatttagaagtgattgaacagatagtgttcaagttgaggttatttgatttgttttctgcttaggatcttctgtcagtcatcactagttttctttttggtgttatttggcattgttctatagtccatcaaagcagaagcttaagagaaaaataacactgaagttttaggaagatatttcattgcatgttttacaatgtaaaaaaaattattgtggaattacaaatgatggaccaagaaaattagcaaaatgaaaagaaacagatgtgtgtttatgtgtgtttatctcaggcagcagattattgggcaggaacattcctgagtagagtttttgactcttaggaaaggctcagggtatgctatgaaggccacagccatagacaacctagccatggttgctctgaataaatcatggattctgcctaaggcagtgaccctgtagctcagcattacccaaatatatctgtacaacattagtcctccaagacgaatgaagtttctatggtcaaagatgtttgagatgctgatatggtttgcctgtgcccccacccaaatcttatcttgaattgtacttcccataatccccacgtgtagtgggagggatccagtgggaggtaattgaatcatgggggtgggtttttcccatgctgttctcatgctagtgaataagtctcacaagatctgatggttttataagtgggaggtcccctccacaagctctcttgcctgctgccatgtaagacatacctttgctcctcttttgccttctgtaatgattgtgaggcctccccagccatgtgaaattctgagttcattaagtctctttttctttataaattacccagtctcaggtatgtctttattagcagcgtgagaactaatacagatgcagattcacaaacatagtagcaatcaggagtcatttacaatattgcttaacccagtgttcctcagagctattcccctagctctcttttcccatctagtacctattgctcacctgtaaaagtagagtcctggtgatcacactttgggaaatggcaatacctttttactccttaattcccttctgtgagtcataagaaccatatcgactacctaattttgtttatgaagagtgtgttgttatggctggacaactttcttacaatgataactttagatcttggcaatgtgccacttgtgtctaacagagagaaaaaagaaaaaaaaatttaagataaccccaatgctcctaaagaattgtggaatctttgttaagtcattgagctctccattctgtctttttaccagtgaaattaggaggctgaacactagctcctctccccttttcaaggattctccaagctctgatattctgcaaccctgatataatgttgcaggttcttctttcccctccccagcagcattctcacatcctcacacccagtgagagtcatttcctgatggtctacagtctggtcagtgttctattctctctgaaatctccagtaactgattacagggggtcaatgggttctcatcatgtctttgaggagcttcaagataacattttcttgctgaattgtcagtccttcacctgaaagtttcagagccacttccttccctgagcacgaggcctgaagttgctttctgtggaataagtgggccactcctaaaggccaccaacccaggtgaaatgccattggatggcaacagtcacgtatcttctaggcaggggctaggatgcccagtggtggggggttctgtctttgtcttctcttatatatgatcccaagtaattacttttcttttccaacttgatttcaaatatactacctacttacaggaaatatggaaaattacacacacacacacacacacacacacacggaagaaaacaaaaatcacccataataacaacgaagaataacattgacccaggggctttctttttcatatagctctgtctctatctctgtcattaggagggaatttatttcttattcctgatgtttctttccatgttggggaacacccattagccaaaacactcctaactgcttaccatagcccttgcttgactcctggggaggtggagtgttattgaactggtgagtttgggagagaaacaaggtatgaacagccccactcctacttgtctttgtttactggagggtgctcctgccaaggatatgtggtctcactcgctctcagcaagctaagtggggaaggtttaagggaggcctgtggagtggccaggtggttaaatctggctgattaggtcccctgacctagacctgaacttctgtactctaccagattcgcagacatgccttgctctttgtaaaccccctgagtgaacacaactccagttcccttgtagccagtcttaccgtgcttcaaacatacccagatcttcctgaacccccagcagtcaatgttacatggcaacatgatatttctgctataatgaagttattatattaatactaatatatgtttctctgattgctttcataagctaaaattccttgaagtaaaacgtctaggtccaagggtgtggacattttaaaggattttgatatgtatttccatatttgggctgatattcagataatggaccaagctcactttagcatcaaaggcatagagaatagaatccctgttttgttttgagcagaaaggcatcttagaaattatctgaaaatgtcagcatcagtctttctttggtggagtcaactcaatcatcagacatcaatctctaataattcaaaatcactgggggaaaacatcacaaacaagtctcttatttttctccttcctattcacctcacaaccctcccagtggtcacactgtttcacagggctccagttcagccaggtggaaggtccgatctctgactgcctggggaaagatggttttagagttattggtgcaggacacactctgaggagcagattcactgtttctctaatcagtctggcaccagtgccttcatggggcagtgctgtagaaggattcttgcatttctcatcaaaagattaggctcttaggatctcttcatttttctgaaagcatttgctaaaggtgtcctctggaattagcacacattgcctgaaaatgctgtgtgctgactgagggggaaacatggctagaacagaccctctttgtgctgggagtactgcctgctagggtgaccacctgtctttgttttctcaggacagtcccaggtttagcactgacagtccaggcaaactaggacaatcggttaccctgctcccaagtaaatgccagccctgaaattcctaccttcagggtactaacaagttagacaattagacagtggagatattgattttggaatgtctgtttaatatgtggtaaaaataattttgggcttagaaaccagaagctcagcttctctcttccccttgttatgagctctgagatcttgggggagttaacactcctccctgtgtttcgtttttctcatctgtaaaacctgagtagtagacttgccctgcctgtttcaccgaacggctccagggagcaaatgtaatattgtataagaaggcactttgtaaactgtaagaagtgggtcagcgtaatgtgattttattgttctaagatatttatgcatcaataacacatgagtctcagttatgatttattctatttattctgaattttgtttctcatcctcacagttaggggtaaacaaacacacatgtcatatgctgtagatggtgactggggcaaaatctggagttacagcgaggctcagggagctgctgagatgtcatcctttgaaaaggcagggtcattacttttggtgcctgtaggcccctctgccatctgtgggtctcttccctttgctgtctcataggacaaagaatgagtttgaggtgaaggtggactgaagattaatcctattctgtcaggcatggaacaagcttttccaaagagcaatcagtaaaggagtcaaggatggcaaaaagaaggagatgccttgccttatttcctccttttatttttttccatttcctaagagcccaagtttgtgaaatgggcctctagtgggaagtgttttaaatgagaaactccgtggaacacaaaacatgatgggcaatgtgaattgctttttgtgttgagtttttggtacccacatttgcctgactgcagtttactacttgagagagaggaatagaatggaaaatgctgtaggcactacagagggcccattatctcaaaataattcttcccttttagaatgtcactgcagtaaggctgggggcagagaacagatgtggctcctagtcaagaatacttagaacccagaccagaaattgaactatgggaatagctgacatccaggacgaaaggccattgttgactggttggtactgagcaatagtgtctagcccctcgaaatgcaaatgctgttgtttgcagcacaaaagcaccaattttccctttaacagagcgtgtactattaaaatagcatgtcctgtgtgtagttgccgcacattctttccattttttttttttctgtgtgagtcagagtgcagattctcgacaaggctgaaaagaaagaaagccatctaatttacatgggcacagagtacccacatctggatagagttagaatgagcgggaattacttgcagcatttaaatataggcgtgcagaccttctttcttttgaccatatgaggcattcacatgtaattccatgaaagaaaaacccaaaagtctacttcttattaaaagaggctgttgttgctagtgtgattcaaccattacaggaactgacccaaacttacaggaattgacccaaacctggaggctgacatgagtggcatgaggccaccatactctcaccacccttcagatggtcagaattatacaatattgttgaaggcatgctagtacctacttgtctgtgccaggaggttggcaggatctgaaatctgtcccagttggaactcataagcattgtagtaagctgctgatgctggggaaactgggtggaaattatcaatggggtcaggccccacgctggatgagtcttgtgtgctttaccaccaccactgatagacctgtttccagttcaaataagatgtggggaaagggaatataaatagcagatacccaggccctaaaaatgtgaaaatgaatagctgatatacagaaaccaggaaaaataggggaaagataaatggctgtcttctgaaactagggcctcattaatacctaattactggcatttaaggaagaactatatagatttcacatatgagttgatacgtttattgatgtgtgggtggcagtggcattactaaagaccttagtgaggaaactggtagacaatatagaaggttataatgttagagagttaacaaggcagaaagtatatatcactttatggacttgttctcaaaatgacccacaaagcattataacaacacttagctctatgcatttgctgagttccaccttccccatgtcagatttctctcagattatatctggtagaattttaggcatttgggcttaacttcctctatatgctcctctcaggcctctgacagtcttctgaagaagcatgacaatattatcatctttgcagttagctttatcagagtttctttctgggagggtagctgtctttatttagaaacagtccttgataagttgtgaatgataaaagtgagactcctaaggcaggcattgcacaggctgaagaaaagtgaagagaaagcaaacttgctctgcattggatagaaggtgaaaaataagactgtgtgttgaaggagaagaaagagagaatgaggagagaagacaatgagattggaaaagttcccagcactatggccattggggactgaaaagacttccaaaaatagagatatctgctattcagtttgaagtttcttttattgctgggatgggaaatcttgtctccccatagtcagggcttcagtaaagtctacctctataaatgtaaattgcctttagtgagtgaatttttggagaccaaggaactgaggagtttcacattgggtttgatgaaatagtgaattgggagataatgcattagctgaagtaacaggaatttgtaggcagaggtatggtaaggactgctaagtgattactggtatccctcctttcttttcctatcataaaaaaactgctatgttttatctgggaatattgctgtccaggtagagactgcattttcttttcttttcttttcttttcttttttttttttttttcttttttctttttgagatggagtctccctctgttgtccaggctggagtgcaatggcgcgatctcggctcactgcaacctctgcttcccgggttcaagcaattctcgtacctcagcctcccaagtagctgggattacaggtgcccactaccatgcctgactaatttttgcatttttagtagatacggggttttaccatgttggccaggctggtcttgaactcctgacctcaggtgatccacccacctcggactcccaaagtgttgggagtataggcatgagacaccgcgcccagccaagaatgcattttcaagcctttttaaaagtacgtgtcaacatgtgacttaagatggttaatatatgtgtagaaacgatacgtatttcttttaggctgtgcctttaaaggaaatgagcaaacattcccctgccactttcccatttttgctggctagtaaataatgaaagagctggagcagatatcttggacccaaatatgggtggcagatgttgaggatgatagagccatcttactaattcttgcttgccaacatctggactgttatatgagagaaaaatgaaattttagatgcagtaagttgcaaaagcactattattttatgtaacctcaagaagaaaaatatacatacccagttaaactatgacataatgcttgaatgacattgattacaaaacacatttccatttcagaattgtttacaagtgaaaattttgtattttaaaacaatacatttcttgtttaagccactgcacctgggattcattgtgttagtggtttatgctatattccacctaacatagaatttgctatcagaagtggggtgctgtcataacataacccaaaataagtggtttagtggttgggcagcaggaggcaaagaaaaacattgcaggctgagaatctggtgactcctgttacatcctgacaaaatattcagaaaaatgttctctaataaaactttgaaagacagactgtatgatgctagatcaagaaactttggtgaaactggttggaaaagtcagaatgttgatgtagtctagaaatttcttatcacttttagattgatgacatcagtctagttataaaaggtgactcataatctaaagtggcagctttagcaaatggtagtgttttagcccaagactttcccatcacttgccagcaagacttcccatccaaatggtgagagctaatccagaagcaaaaatcagattaagggtgctgccttcccaaccaaatctattgtttcagatggtcccaaagaagctataattaatgagaaaatgagaaagagagagtgagagtgagagtaagagagagagagagagagttggagcacaaagaccagtacatgtaagatcagttttttttgttgttttttttttttttaaaaaaaactctgtttggatgaactctttggctgcagttaaatatatatggaaccaatggaaccaaatagccagaagcataaaaatagttttgagaaatttaattgccaaaaacccacaagtctggtttccaaaagcctcttattcttccatccctaaaacaaccccagtggtattagtccattttcatactgctatgaagaaatatctgagactgggtaatttataaagaaaaaggggtttaatggactcacagttccacatggctacggaggcctcacaatcatggcggatggcaaaggaggaggaaaggtatgtcttacatggtggcaggcaagagagtatgtgcaacttgcccccatgattcaattacttcccactgggtcactcccacgacacatggggattatgggagctacaactgaagatgagatttgggtagggacacagccaaaccacatcaccaaccctccaaatataccccaagcaggaaataagttacaaaagcagtacagctctcaagtcgggcatggtcttcaatactcactttatatgtgataagtgagaataatggagaaggaaaaacttctaagtaggcagaagcaggatcaaattaaggcaatttatccatttagggaagggagaatttggtaattgctatggacaaatgactgctgtgtttttccctttttctttacataataggagttttaaattgtagttcatttgtttctactccatcattgtagactgtgtgtgtgtgtatgtgtgtgtgtgtgtatgtggaagtggaagataactctccactagaccaagagaaatcctatttagacttgatggaaaagactgcccctcatgggagagcccagacttggagctagacggaatgttgggctggattcctcagggatgggaaaagtatgttccatttgttgggggaaaaaaaggtgtgaatggatatctgagtggctagaggcaggatctgatagagactgctgattgtcctccagcatccattttttctttcctttatgcatagaatttcctttttgtagtttgatctatgtcagcccaggtaatgactcccattccaggtcttttgcagctagttgtgcagtgagatgagctctgggcaatggggtatgagcagaaataatgagtgccatttctgcactatgcctttataaggcatagacatgagctttgtgtgttatttccctcttcctgctatctgggatgcagatatgatggcaggagctggaccagtcaccttgaactcaggcatgtaatctcaggcattgaagatggctgagtagctttaccttccttgttctggaaatctctggaccattacttaggagagagtaaacttctcttgtgtttaagccattgctgttttgagcctctttattttagcagcttagactgaaccccaagtaatacaagccgtaaccaacccatgaattcacacaaatcttgtggagagcttctgaattagagattcaagccaaatcttatctatatctcaaggggaaaatgaggagagaagataagatctagatatactataggccttccacttcccagaacagaccagaaaacatagacaggaaataaagatactaatactgccacagcagcctctgccccaaaatctggccaggaggcaatgtgaatctcactctgtccaaagatgtgggtaatttttacatgtttgttcagtgttatcagactcctttctgatattattgcttaaaaccaatactttactactggcatagagaggaagagaggccaaaacacatatttttcccccaacagaaaatgtcagagtttttaaacagagaaatgcaagagatatttcaaaatttatcagtcactggactaaattgagaaagttatgttgtgggtttcttgagaggtctcatacaaaataacaatgaacatgtattaggattcttggagcagtctttctatttgagtcacctggatgctcaactagacgcatgcaaataggaaaatgtagctttctttgctgactccagccaggctctgtcagaagcattgataagggcaactgatgcaggctgagaatacgggcattgaataaatgctgagccaattgcttatatcctcatttactcacagaaacatggatgttttacatccagagaagccttgaccaataacctggttctcattttacattcatggaaaactgaagtgacttgactattagagacagcagtagactggaacatggtctcctgatatccagatcgttgttctttattttattattgttaaatttttagttgacacataatcattgtacatatttgtgggatacagagtatagttcaatacatgtatataatcagggtaatttacatatccataacttcaaatatttatcatttctttgtgttgggaacattcaagatcctctcttctggctatctgaaaatatacaatgaattattgttaactataatcaccctacagtgctatagaacactggaactcatttctcttatctagttgtaatttcatgtctgttaaccagcttctccttatctttccttccccctacccttcccatcctctaataattacaattctactctctacttctgtgtgcttaacttcatatgagtgattctatgtctgacttatttcacttaacacaatgtcctccaggcttggccatattgtggtgagtgtcaggatttcattcttttttatatctgatatctgatagtattctactgtgtatatagaaaaggcacactacattttctttatccattcatctgttgacaggtgaatgggtcgattccatatcttggctactgtaaataatactgcaataaacatgagggtacatatatctcttcaatatattgatttcctttcttttggataaatacccagtagtggaattgttgaatgatacagtagttctatttttagttttttgagggacgtccatactgttttccacagtggctgtactaatttatattcataccaacaatgtgtaagagttttcttttctcagcatccttgcaagcatttgatattttttttgtctttcttgtaataagcactgtcactggggtaagatgatatctcattgtggttttgatttgcatttccctgatgatcagtgatgttaagcatttttttcatatacttgttggcaatttgtatattttcatttgagaaaggtctattcagatcctttctccatttttagactggattatttgtatttttttactgttgtttgaatttcttatatattctagacattagtcccttgttggataaatagattgcaaatattttctctcattctacgggttgtctcttcactctgtggattgcttccttgcctatgcagaaactttttagagtgatatagtcccatttatctatgtttgcttttgttgcctgtgcttttgaagtcttactcataaaatctttatcaagactaatgtcctgaagcatgtctcctatgttttcttctaagagtttaatagtttggggtcttacatttaaacttctgtgcattttgagttgtttttttttttttttttttttttttttttttttagatggagtctcgctctgtcgcccaggctggagtgcagtggtgtgatctcggctcactgcaacctccacctcccgggttcatgccattctcctgcctcagcctccccactagctgggactacaggcacccaccaccacgcccagccaattttttgtatttttttagtagagacagggtttcaccatgttagccagggtggtctcgatctcctgaccttgtgatcaacccacctcagcctcccaaagtgctgggattacaggcataagccaccgcgcccggccgagtggatttttgtatatggtgagggatagaaatctaatttcactgatacccagtttttccatcaccatttattgaagaagctgtcctttcttcaatgcattttcttggtgcctttgttaaaaagcagttggctgtgaatgcattgacttatttctgggttctctagtctatttctttggtctacatgtctgtttctgtaccattaccatactattttggttactatagccttgtagtatgttttaaagtcaggtaacgtgatgcctccagctttgttctttttgctcagtattgctttggctattcatggttaattgtttcatacacattttaggagtttcttttttctgtttctgtgaagaatgccattggtattttgataaggattgcattgaatttgtagatttctttggatagcatgctcattttaagaatattaattcttacaatccaggaatgtgagatatttttctgtttgcttgtgccctctacaagttcagtggttgtttttttagactccttttatgcaacaaagttccatcaaagccaattttaaaaggctagtgaaaactaattattcttgctgcactttatacaaataatcaggccaagtatataaaccaaattggtctttttttaaaaaaaaattatgtccataggttttgggggaacaggtggtatttggttacatgaataagttccttagtggtgatttgtgagattttggtacacccatcacttaagcagtacacactgaacccagtttgaatttcagtgttatgtagttttcattgtagagatctttaacctgttcagagaaatttattccttggtattttttttttttggagttattgtaaatgggattactttcttaatttctttttcagctagttcattattggtattagaagcattaccaatttttgtaagttgattttgtatcttgcaactttactgaatttgttagttttaaaaggttttttggtggagtctttagaatttttttaatatgtaagattatgtcatctgcaaagagagacaatttgacttcttcttttccaatttgaatgctcttcattttttttttcttttgcatgattgatctggctagaacttccagtactgtgttggataagagcagtgaaagttcttgttccagatcttagatgtcttgttccagatcttagatgaaagctttcaatgtttccccatacagtataatgttagctgtgggtttgtcatatatggtctttattgtgtgaggtatattccttctataccaatttgttgagagtttttatcatgaagggatgttgaattttatcacaggctttttcggcatctattgagatgatcatatgttttttgttcttcatttttagatgtgatgtatcacgtttattcatttgcagatgttggaccatccttgcattcctgagttaaatctcacccgattatggtgtattagctttttgatatactgctggatttggtttgctagtattttgttgacgattttttgcagctacgttcatcaggcataatggtctgttttgtgtatttgttgttgtatccttttctgattttggcataaaggtaatgctgccttgtaaaattaattagaaagaattccctcctcttaaattttttggaatagtttgcaaagaattgatgttagttcttctttaaaagtttgctagaattcaaaagtgaggccattctgttgtggacttctctttgttgggatacttcttattaatgattcaatcttgttacttgttattggactgttcaggtattctatttcttcctagttcaattttgttagcttatatgtgaccagatgtttattcattttctccaggttttcaaatttgttggcatatagttattcaagtagcctttaattatcctttgtatttctgtggtatcagttgtaatgtctcctttttcatttctgattttatttatttggatcttctctcataattttctagtctagctagtggtttgtggattttgtttattttttcaaaaaaaatgaattttttgttcatcttttgtattttgggggctgtatttcatttagttctggtctgattttatagtttccttctttttcccaatttggggtttggtttgttcttgcttttcgagatccttaggtgcactgttaggttgtttatttgaaatctctacttttttgatgtaggcatttactgctataaaattccctcttagtactgattttgctataacctcaggttttggtgtgttatgtttctattctcattgtttcaagaattttaaaatttccttcttcatttcttcattgactcattggttattcaggaagatatttgttaatttccatgtatttgtactttttccaaagttcctcttgttactgatttctagttttagtccattgtggtctgagaagatacttgatataattttaattttaaaaagcttattgagacttgttttgtggcccatcatatgatctatcctggagaacattccatatgctgctgaaaagaatgtgtattctgtagctgttagataaaatgttctgtaaaggtctgtttggtccatttggtctacaattaagtttatgtttaattttttttaaattttctgtccagatgtgttcaatgctgaaagtggggtgttgaagtccctccctgctattgtattggagtctatttctacctttagatctaataattttttcttcatatatgagtgtgctctggtgttgtgtgcacacatatttagaattgctatatatttttgctggattgatccctttatcattgaccttctttgtctctttttatgtttttgatataatagcaattactgcttgcttttggtttctgtttgtgtggaatatcgtattccatcccttcactttcaggctctgtctttacaggtgaagtgagtttcttgtaggcatcatatagttagggatttaaacaaaattcatttaggcagccttagcctatctttttttttttttcttttttgagacggagtcttgctctgtcgccaggttggagtgcagtggcacaatctcggctcactgcaacctctgcctcccaggttcaagagattcccctgcctcagcctcccaagtagctgggactacaggcatgtgccaccacacctggctaatttttttgtattttagtagagatggggtttcaccattttggccagcatggtcttgatcttctgacctcatgatccacctgccttagcctcccaaagtgctgggattacagatgtgagccactgcacccagccagcctatcttatagttagcgaatttaattcatttacattcaaggttcttattgataggtaagaatgtacatcattttgttaattattttttggctgttttgcatatcttttgttcctttattactctcctattgtttatctttgtggtttggtgatttactgtggtaataatatttgactctttcctttttctaatttctgtatctgctctaccagtgaattttgtacttttgtgtgttttttttctgtttctgtaatggtagatattgttcttttgcttccagaagtataatttttgtagggacagtcttttaatttatgaattccctcagagtttgcttgtctgagaaagactttatttctccttcatttctgagagatagctttgctaggaatagtagtcttgttttacagtgttctttcagcacttggaatatatcatttcattctttcctggcctctaagaaatctgctgttagtctgatggtaattcccttatgtgtgacttgatgcttttctgtttttgttttcagaattctctcttcatcttcatcttttgacaccttagctataatatgtctcagagaggtcctttgtgggttgaacctatttggggatatttaagcaccctgtatctggatgtctatatctctcacaagacttggaaagttttcagctattattttattagttatttttctatgactttgcctatcctttcttctgaaacttccattatgcaaatatttatttgtgtaatggtgtccgtatgtcccatatggtttccttattctttcgtattgtctgcttctttgtttttgtctgactgggttattttaaaaaccatccttcaagttcagatattctttcttctgtttgagctcttctactgttgaaatgcttaattgtattttttatttcattaattaaattcttaagttccaagatttctatctggttctttctaataatatctatctctgttgaatttcttattcagaccatgaattgttttcctgattgggttgaactgtctatttgttttcctatatctcactgaatttccttaagatcattgtgtttcattcattttcaggcatttcatagatttccttatctttgaggtctgttactggaaaattatttttttcctttgtaagtgttatatttccttgcttcttcatatttcttgtgtccttatgttgatatttgtgcatctggcagaacagtcacttcttccaattctatagagttgctttcgcagggaaagactttttcctgtagtgttctatagtgtaggttgggtaggttgctctggctttgatgctatgtgagtgcagtagtctccatatgatttatttgactgcaactgcctcagtggcctaggctttggttgtttgtggtggctgtggcatggttttgttgaggatgtgaacattgggtaggctggtccttgtgcctttaggtagcacatgtgggcatgcagcatccctgctggaggtggcagggtcattggtggggagcagcagcaagccatgggtgggccatttctctggtccccaggcaggtggttctcaggttctggaagggcacacattggctccctgggttctgtgggcagcctttctgctgcgcgggacttcctgttccccagggtgtagggtgctacatgaacttgggtgctgggttctcagctgtacctctgggtccagctggtgtcacaatgctgcagacctttggatgaatgtggtaagatgtcagtgagtcccagggatgtggaaatgttaatgttattgggccctctgtcaggttgtactctggtggtttctttgctctcaaaatgctattttgctgcagcagcctggttcctggggagtgagggcgaccaagtgtgaatcttctttctggaataatgcagccacattggctccaggtagctccccagtatactggactcagggcctgtgaagtctgtgaggactctcctgtagttatgattgtaggtatctgtggtgagaatgtggatttctggagatcttctgcttatcttttccctgcagtggggaatccctcttgactctgaattcatcctggctgcctgctttgcttccctctctatgctgccatcatgaatttccatgccttagagggtctttgtcactttcttgctggattccagtgtttttccttagatattccatacaagagttatctatttattgttttgggtcttttctatggaggaggcaagtgctgggagcttctagtcagccatcttgatgatccagactactgttctgcctcactttgtcaatttagaacttccactggagatcttatcaggggagaaacacatactatctggggctcccattaggattgttgagggagctctgagttgaatctttgattccattttagacaaagccactactcttcaaggtagtggctattcactcactgagcaaatatttatagagatcaactgtgagtcaagtgctattgtagatgctgaggatatattaacaatgtcaaacagacacacttcagcctgggcaacagagtgagatgtcatctctaaaaaaagaaaagaaaaggacatacatctctgctctcctggaacttatgtaacagtaaacacaataaataaattatgtggaatgttaaaagtgcagtagaagaaaagaaatcaggtagggggaatgggagtaccagattgagggtggtggtgtaattttaaattgggtgaccaagatgggcttcactgagaagttattactgcaaagtcctgaaggaagtgagataatggaccatatggatatttcagtgaggaagcatgtggttcagagaaaagccagctcaaaagtcttgaagcaggagggtagcaggctagttagtagaatgttagcttcttgcactcttggtaaatggtcatgattcttttaaagaatctctctctctctctcatcatggataatactgtaaatagtattactgtctcctttacatggttctcttgcaactactattactagcatatatcaggcagtgctccaagtactctatatgtttaattcattcaaacctcagaatagtctttgaatttaggtaatattatctttgttttacaaactgggaaatatagagattaaataattggtttacagtcacatagagattaaaggtcagagacaggatttgaacccaatgattttggtaccccaggactttggcaggagagcccatactttttaaccacaatgctctaaggtgccccaccagtctgctactgataggacatggtcttcagtctattcttaggtagaaatcaaagtatttgctatgtcttttaattattaaatccacatttggagacggactctaagtataatccccagggtggaggtgaatcttccataaacagaaatggttgcttaagaaaaaaccctatgttttctttagaacagaacatccaagttacatgggaatgcaccatatgattgttgtgaattgaagtcaatttggcaccaacagaaataaccttaggaacaaagttgtatacagtatgttcttacggaaaccacacttagaatgcagagtaaactgttaaggatagatctttctttctggagttgcactagctgtctttgggtggggacagcaaattgtttcgtttataagatttgtacatcaaagctagatctgcttatactttaaaaccaaaaggaggagaaagacttatttttagctatctgaaatttaaaccaaacccaacactgacatatggatgtttcagactgcaccatgtcagaaaatttctcagagatgacattaaacaacaatatattattgcagctgtagagagtcagtgagatccttctcttataattttgtttaatagctattgggacactgggataaagattcgatttttcagaactagagctgggtggctgagaactagaattgggttcagtcccatgagagtgagaatttcactatatcttacagaaacagtttttggtgctttaggttggtcaattggctggccaaaggattagctactgcactctacttataaaagaaaactttaatttaaaaaatgtacgtgtgcgtgtgttgtagataatatacttattcattttagataagttcaaaaatatatgttaatctaaaagtattcacctgtaatccccaacctcagaaataaccaatgaatattttggggtatacctttttacctagatagatatacaagtattgaacagatgtagagctaggtagagatatacagacctgtcatacatatatcaaacagatttttttcactctacaaaaaaatgggatgaaaccatccatactattgagtaacctgttttttaattttaatgtttttcaatgtggtattttacttagcattttcttatgccagtaattttttaacacaatcacttttacttatattccatttaagttcatgcatattccatgctttattttactgctaccctattgtgataggtccccaaagatcaacatgccctaatccctggaatctgtgaatatgttaaattacatgacaacttcttttgtgcagatagaattaaggttactcatctttaggcagggagaatttcttgggttatcagatgggcccagtgtaatcacatggcatttcataatgaaagatggaggcagaagcacagatcagggagctgtgatgtgagaaggactggccccatcataagccaggaaatttggaggtctctagaagctaggagcagttatcatctgagaatcagtaagaaaacaaagatgtcagtcctactaccaagaggaaacaggggcctattcttccctacaacctccgctatggaatgcagctcccctgacaccttgattttagcttggtgaagacttgaagcagagaacccagaaaagcccaatggacttctgacttacagaactttaatataatacatttgtgctgttttcggcaactaagcctgtggtaatgtgttatatggcaatagaaaactgacacaccttttgttgtatacctgggtcattttcaatttctcactaatgaaataagactgccatgaacatcgttgtagctaaaccttgatgcacatctttgactatttatataggatcagtttatttaagggtaagtatgcatcagtggtctatgaaattttcagacttttcatgtgcagtgcattgccgaatttaaggaacatcatttcctgattgggagttaggcaaatggataaagaaaggccatcattcttttctttcagctattggttctagctatttggtttctatagtgtttacagtataactcttcttttcagctggccacagaagcctttgtgttttctgtgtagatggaaataattgctacatttgtggaataatggccaactcaagagctgcttgaagagatctttatggtgaagctgctccctaaagtttgaaatattagtcaaagtgcatcagaccaagctttagaactgaaatggaatttgctttgctcttcaaacaccacttatgctggcattagggaagggtgtggggtaggtcaaatatccattactgggcaaacaacttgaagtatgtttattttatggggctctctccatatacattagagttggtgagaggctaactgcctcttttatgagcctcaagggtagctttgctcaaatacatcaaccacatcagaactcaaaagtgttgattgggaggcagctaatgtagatgaaggatttagaaaaaaatatcaccccaggtgaccggatgtacctaaccatgttcccagctcaaagccagctctcatctttcatgtttagaatggcataaagtttaaaacaatattaggtttcagataacatatttaacattttggctgtttattctttctgaagccacacactgatcatactttttgcttcaaaatgcgtgggggtcagactttaggataactcagctatattcatatctgaaataatgaataatgagtaatacagaaagtagccacattaatatatcattcactttacaaaaatacccattccagcattcttttaaaatattcaaagtctccaggaaatttaacgttacacttaatttacaaaaatcagaattatacataagtagtatacagtgaaactttctctctctctctccatgtatttgtgtatgtgtgtgtgtgtgtgtgagagagtgattttaagttcttgtgatgtagaacagctattgcttttggcaaaccagaaacttgttcttgacaagtaatttcatcaacagtgaagcttttttttgtttgttttaaattgggactctagtcagtgaccttagaaacaataccattagcaagttcagttgtggaaaggcaacctagtatagtaaaaagaacacagattgggagttagacagactggctttgactcctacatgcccggcacttaccagttgtgtttttttggggaaattttctgtaaactcattaaacttcagcttactcatctgtaaaatgggaacaataatattcatcttgcaaagtatgcatgctgtctagcatattagcatgcttcttgacacagatttggggttcagtgaagaaggtactttcagttgtcttgtcattccagagtaacattattcagatgcaggggaccaaatccatattttcctttggatgcaagctatgatggcttgaatgccttggatgtggaagagagaaagacatataaacaaatgaattaatgaataaagcaaataagaggctgttcttcactttacattcatgtcagctaatatgtgaaattgctctaatagaattaatttattgggtagatgaagccttctttttcactttcacacaacttcatagacattgagaaaactaatgtgtatattaacagtttccattaaatatataacttttctataaaaatgtaacttcaatgcatttagcaaacttctctgtgaaagaacatttttagttgacatatttgaaattaaagtgtcgtttgaactgaaatggcacttccctgttcaaaaatcttcaatgatttctcatgttttacagaaaaaaatccatactactttgttgctgatcttatatcagtacttcctcctatcatatttttcattactccattaaagtagtttttattcatctcagattgatctgtataatatcaaaatgcattagtgctatagggaacatcttgtgttttgccttttcagtaatatctaatgataactagttgtttatccccattccctgatccatgtaatgccagcttgaccaatcaggatgtttcatcttccttactgtagtgattggttcaggaacgagtagataattcaagatggttggaatcaatggcgatactgagacttttgcggatcaactagagagaagtcatagttttcactgctctatgggacagctgagaatggtgcaccattttgctgcaactgtttgagtgccttccagaatgtaaagttaacacagaggaaaaaagagctgagagaagattagaggtagtgttctggtagtggtgtttcagtccttaaagatgaactcctggactttgtagtgacatgagccaataaattctctatctggattcaatttgaaataggtgttcttcatcagcacagacactttctgtgtgagcctatatttctcatttcctaaatattctgccttttcttctctactcactcaagagctacctgtccttgaaggcctcattcaagttccagcttattgatgataccttattcaactacccaggccttgatcactcactccctgtaatacccatagacaattagttcatttgcgttaaacagtcatgtagctttttgagtagctttctgatctttccagtatctttcaagttcttcaatgggtgtttatttgggggagacattgaaattgaataatcagtataggtttctttttaaacttggtttcagtaatcatgctgggagacagagataggtccttttctgttcttttttctccccccagccaaatgactgagaaaaagaactgaatttagccctcaagtttgcctacacattcataacaactattaggtctgggaccttagtccactgagttaagatgacccatcttttgcataaataaataggtcacctgagcaacagtccaagaagattgctcagacattgcatatagttgacagtaaactaaaattattgtttatgaatgtcataccaagctgatctggtgatattcaagtttattgctaaagctcaacactatggaatgctttgctgcaaccataaatcttcctatgaagtacctttttgtgtcctgaggtactccagatcttaagtggtcaggtagcttgttggccaccaaggtatcaatgctcagaggccgtggagaacaaaagcatcagaatgttttcagcaacaccattttctttgtgcattggtcccttgcctttgttcagtcttaaggcaattgagataaaggaagaactggatttttaaaatatcctgttgccctgcctttcctaaagcatccactgatcagaaatatagtcactgaggccgaggttacatagtagacaagaaaggcagattgttaataatctactagattcagactaggtgtgccatgaaacacaaatatggggacgagagtggatctggaagtactggattttccttttaccatctatacaacacagattcattaattcatcctttgtcttattttcacatttcagtccttaccacctctacctcattggccattaagatctgctcattttacctttgaaatgcctttcagtctatccttttctcttcattctcactgctactggactagctttggtctcattaaaaatgtccctttaatggtcttttttccatttatattgtttttttaaattcaatctttatactaacaagttcattttgttaaaacacaatggagataacatactatctctgcctcaaaactcttcaaggagcttcgtcttctacttagtacattccaatctcctcatcatagtctctggtgtcttccatgatgtggttccaattcatctttcatgtctattttggtccattttatcacataaggacccagtatagattgggcattattttctttattaaacagacacattctttgactaagctctgtcaattaaccaaatcctagatacttcaagacctgttctatgaggaggagtcagagaaaaaaaaatgacaggcttaagctaacaaggaaaaataaaatacagtattaaatctacttcaatgggctataaaaaccagtaaaattttaattaatgtcctttaaaataaaactgcatcaaatgcattaaaaaacattggccaaagcacctcctagtcttgattttactaagcaattttaatggagaagccttttctcaccaagggtctgttaatatttccaggaagcaggtccccaaactcttctttcctggaaaatattgcttaactgtacatttctaatgaagcaagttcggagattatgagtggagaccagaggagataaggaaagtaaataaataaaattaaatctgctgttaaaataagaatattttctagcttaatcagcaaacacaaggcagagagtttaagcagtcttgaaacaaacccaatgctttttaataaatgagcagaataggaagttaaataagggattctggcgctggggttcagggtcatggaagaagctacgttagaagaccactctggtttcatgtatcttagcagaatcgtcagagtaaaatctgaataccccgattatttttaagccctcaggatggagttaacatctcccataaatgacatatatcatatagacgaacagccaagtactcatgcctcaccattcaattcatgtaacactttccctctcctcaaagaatgtgtgttttacacatgtcatctctgttcatctctcgcctctctgtggaaacccagcagaagaatgttgagtgactcaatcaaggttatggcatgaaagtgcttgggagctggaagggaacccaagacacccattcagtgccatacacatgagttcacactgctgggtaaagcacattgcaattgaatgcatatttaagtgatatatcagtgctaaatggtaacacatgtaatgcttcccacttaggatatattcttggctaactctgttggaaaatattatatggagatttctttacggtaaaaaaaaaaattttgagcaaaatttaaacaaaaaaggacaagatcagaagcccgaaatattcccacacccactttttggggaatggtaggggctccagcaaccttaatttatggaggctattaagagctaaggcagaatttgtacagttcaggtatactttctagagagaatcatcaaattaacgtaagcaaaaccatgacctgaaatagaaagtaatagtacaaagcaaactcttcatggaaaagaacaaaaccctgttacaacactgagcactcaaatctcacaactgcctaatccgggtgtttctgggactaggaaatgtgtaggcaccgcaggagttgacagaaagcccaatcttttgtaggttgagaaacgctggcatctgctaagaaggctgctcaaaaaatatatatatataatatatataatatatatataatatatataatatatataatatatatataatatatatatataggacttgtgcatcccatgaaggtaaagaagctcctgagtattttgttgtataaacaaacaaatcagtttctacatttgtgttggcattgatcggagtgtgacaaattaaaagggggctggagaaatcttccttagaacaatcgagaattaacctccaacttctcctagcctatatttagatggagacagattagggtcatatggtgggacagacatttgcccctcatagaatatccatatgctccccacatctctcagccccttggcaggaaggtagccaatgagctgcagcatttgaaaactgatgtgctacctttagctttctcttctgttgtcatggtggccttgaaagtacgtgcaccaagattcacagcaataagatttaagcagattgagtccctcagctgtcctggaggacaagtggtctggtgggattgagaaataagcctttctgggttaaaccactgagatttagggaagtattagctaccacagcacaacctagcttattcagactaatacacataggactgagataacttttcttgtcttgagggaacttgaataattatgaataatctctctttttcccgatttaccttatttcttactttctgactctttgacacatggttatgactgtaaaattccagtcaatgctttcacatgggcaatagtagacgtttagtattaataataaatatttagtattcatggacatttagcattaaatctgcataaaacaaacatgcattcctgcaatattggtcctgaaatgttggtgtgcatttatttgacacatgccatgtcctttacttgaaaataaaagtcctcagtttctttttctttttttttgagatggagtctcgctctgtcaccaggctggactgcagtggtgcaatctcagctcgctgcaacctctgcctcctgggttgaagcgattatcctgcctcagcctcctgcatagctaggactacaagtgtgggccaccacacccagctaatttttgtatttttagtggagatggggtttcaccatgtttgccaggctagcctcaaactcctgacctcaagtgatcctcctgccttggcttcccaaagtgctaggattacaggcatgagccaccacacctgacctcagttgtttctttatcttaaagccggcagcattagagactttttactaaactgttaatgtgacatttctgatgtcagatgtattctgtttcaatagctgttctttaaaatcaggctttacaagcagactattatactacaggtgattgtccaacagaaattttgggtacgatgcttttccttttggaccaaattctaaaagcagttgagctgcaagggtgcattgtataaatggtctagacaatgcaaccagtggctgaagacccacataattactgtataaacactaatttgtatgctcttttgggtttatttcaaaattaattacttagcttttttaaaaagctagctccaatttctaggagatgcaccatagacacaagactacagtcaccagctacagttaccagctgaacaacataaataaaaagaacaggagaatattttagaattcattgttcatttgacctttattttgttagttaaaatgatcatgtttttgagtctcttcttaattgctctttgaaatctctgtgctttttgtaggtgcaagagtcttactttcaaatttgagctaatccttaaaatgatgtcaattgaaacatccctttgctggcagctaagagatgtgagagccagttcttaaactggttctttgatcctaagtgattacctggatttcagttttctcgtttcaaaaatgttcttagaatatcaagttctaatattctaagctttcctggtattgatgtacattctaaggacacaaagagaaccacatatatgtatgtatatatgtacctatccatctaaataaatgtgtgggtatgtatgcatagatagatgaaagtattaatatgtacattctcttaacatttcagatatgactttaaaagctgttaagagaggccaacatttaaataccatttccctatgtcattcatcttataattattcacatttgccttttgtgactttggagtgtcaataacttattgttttactctgtgtattttaggttgatcaacaaagtaacaacttggatctctaaagggatatagtaataattttgctatatagaaaacttatcgtggggtttaaccagaacctatgaaaattactcttccaagacaataataataaacaaaaaaaaataatgaatcagggagggagagaggaagatagggaggaaagaagggagatacggtttaggctgcatgggacgctttcttatgccagggactactactgttcttattccccacagtacttggtgccttgcactgtgcctggcatgcaataggcagtcaataagtatttgctaactgaatgacagtttcagagtggctgactgaaacagaagttttagcatttaaacaatgaatgactgattttcaattattcttatctcttaatgaatctttgaccaggcatgcaatgcagcgaagcactgggggatgaaagtttatgacatctgtgttgttttaaaggagtaaaaattgtttttctgtccattctctgcacctttacagctgtcttaatcaagggtggccagcatatttaaaatactgactgagtgccccttcagcatccgcccttcgaaatgtcataaccagaaccatgactccttcttggggttagggatgactgaatgatggtaggaagtgtgatcatagacgagggcagagagattagggcctctgccctgggatcaaccctgtgtttggggtccccactctttggtactctttcttcaatttctctgaaccgctgagttctgagtcttccctgccttcaacttatataattgtctaactcctcaagctgtttttgtctccctagattttcaactggtggtctgctgtgatgcagaggaactgcttcattctttcaatccctcagacctggacttctcattcaccatctgttctgatcttggcgacctgcctgagactttgagccacatttgaatccttggctgttctcttctgctgcctacaccctggcctgacccagagaacttcataaggacacagacaaacataggagaaatagttacaggacatggcacataaagggaaggcctatgtgaattagagaggtgagggatgatttcccagaggaggtgggacatgaagggtagattaactcagtttttcctcttcctgttggtagtaagtgttgcatgaacccacatgtaataaaatggaatgtctttagcatgctataatatattaaggctctttattcttttacagcaagttttctagtttccatacattctaagatttctctattttccttatatgctataagcgctttatggcctgaattggttgggcataggttcctgtgttctccaccctcctcctccacccttgtttatacacatctgtgcttgcttatttcccatcttctcagatcatagttcatggtctgaaacaatcatctcagagttggctttcctcttggggatcaactgattcagccatgtctgccatattttgtgcagccatcctcactacatcctgaacaggcttctccaagtggtgaggtccaacgtgggtcttgtccagggcagacggaagcccccagggccaagtgacaggcttgttctggctctgcctggctcaactcagggattggaaggggaggcacagaattgtgccaggagctttctctatgggctcctctgcttagacccagctggcttggcttagcaacagtgacatcgagggggcaggattcacattcccttttcagaggctttggcagcctctgcagctgtagcggtggcttgccagtcttcccacccacaccaatctttaaagggggctcatctgttaccttccattgactcagcagctcccttctttggatgcgcattgtatagggtgtctacctgccatggcaagtaggagaattttggagaagttaaggaattacagcctgtactgtactcttgggtctgagtcccagggagttctctctctttttagtttcttttttttctgcatgtgtctttatctattaattttaattaatttttttcattgacaaataaaaattatacatatttatggtgtatgatgtgatgtttaatataagtttacattgtggattaatcaaatcaagtcaattaacctagagagttctacaggatgaaatatacttcttgcttaagaaaaggatgttttgattttttcccctttattaaagaaaccaaatgcagggattagaaggcaaagaggtaaaacagctgagctatgctcctggggagcctgtgctagctccattgtcaagagagaatatgttttggttgcttctgtcatcagagaagctcagtcgaagctactctcaatcttcaaaattagcagcaatgtagttatgtgtaggaaaacatcctagaccaggaaagaggagcccagctattgctgtgagcctttgggtgaaacactatcttgggtccagtttcctcacttgtgtgtaaaacgaggtctgagatcttgactctggcttcaatgtacttttgagaacatgccatcccttgatttgtatacctgttggcattatctactgtggcgtcttcagcttggggtgccccataggctcttcttctatacctttgtctccaactcattatgatgaaagagtttatttaaaccacagcacagagatatacacccatggggtacctaggagtagcacaagtacgtaaggcactttctcaacaaaagagacagattatctttatgttctttgtcagggcagcccctctgaaacactgtgcttcctatgctgtgttccttgtattgtttaaagaaacatgcaccacgggaccttgctgcctggataacatggacacccctacggtggattttagtttcttcatctgtaaaataagagaatcctatctgccttgtaggtatgagaatcaagtgaattaatattatgtaaattatttagcacagcacctggcacatgggaagtgcttgctaaatatctaagtacccatgaaatgttggtagatacactacttaaaaaaataaattaaaagccttaaataaaagaagtttatttggaaaatctgggttgatcaaagtcagacacatctttttctttagtatttagaatatttaatgccatcccatgcgggggaattttgaaacttcatcagagactatggagggcctagagtattgtttggaattttccacacctacttgactgtggagttgcttttgtggaacacctaatatggtctcagggaccctgaatgcgttcatggaacatagttttgggaacatggctccaagaacatgaaatcctcttgctaatttgtgcaaccttcatcaaaagtctcttctgctggtttggttctcagggactgcttatccagagggatatctgtcacttttgtgctgtcttctacttatacttttagtatttataggaaagctgccatttgtatttacacttttacttgagtaactacctgctaactttaaagattgagagtagtttaggtggtggtaccctgttgaaggaagcagtttaaaataagtgtatattgacatggagttagcatggctggctgccttggtgaaagagcatggacaactaacctacctccactcattcctgacatcgaagtatagtgctggctttgtgaataaggagaggtgatctttgtgctcctgaggttaatgagagccaggagcctggaaaatctggaaattctccttacactcttcacaggacctgcaaacaatcacatctcttacctgtcacccacaacttaatggtcaacaggcctctagagagccgagtctgcaggtggaaaatgggaactgagaagaaggggaaaggtgcagctagacccacagagcgagtgtgtgcctgcatgccttattgactcgcccgagaactgtttagagctacggggattagattaggaatcagaatctcccaggatcaaggacctgggtggtcctttggctccccacagaacagagtgcgaacacattagccaagcagtcagaaccttcccaaacggggtcaatttcacttctctccctcacataccaatgaaaccttcctcttcactcatctgggaccactatccccaccccaccaccaccctgtacatttctgcctctgaatctttgcttgaataactttgtttccatgtcttctgtcaaaatcatacgtattttttaagagcaaactcaagaaatatcacatatgcttccctgatccttcctcccatgcctacctagtctccctccatcgggacagccaggttcccctctcctatttactgtagtttcatatgctgcattttgagttcatcttgctccactttacattatgagttttggggtacacatgatctccactcagaaaataatttatttgagggcaaggactgtgctgtttttatctatgtccctggccacatcttaatgagtttgtgctacaacaaaattagctaaaaccaattatttagacacactgacccactacaatgtggttttcttagtgtcaaaattcgacatgcatgtgtctattaagagctatttatttcgcattggtcatcactactcctcttggctaattgttttgcaagcacaggtgatttttcttatttttctaagcttactaaatatgaaatcacgtctacatgcctaataatggcattcaagactctcaccatctgggctcaatatatcttttgggcatgtggaaatggggtgtaaactctccaaattctcttcaaagaacagctgggcctaaagcaggatttctcaacctcagcctggttgacactttgtgctggagaaggctttgttgtggaggggtgtactctgcatgacaggatgtttagcagcaacgctgtctccacccaccagatgcaagtagcgttcctcactgtcccccctcatgctgagattgtgatagccaaaaatgtctccagatactgttaaatgtagagagcaaaattgctcctggttcaaaagcactggtctagaggtctcccatattttcctctgagtcctgggacaaagtggctcaagcctccttctctgatgactcaggtgatatctctctcatcttgggccaatcacaaatgaatatagccagggagaggcaagtgctttctgaaaagcaagaataggtcatgctttgtcattcactggtagagtcagaagtaagccataatacaaatgactaagagtcaaccaaagacaatcagaaaggtaattagaccagtgatgttcaaagtcttgtttgtaaaccacatcttctggagaaatgattaaaaatggaaattttgcgggttattatctaggtctactgtattgaaatctggatttttaacaaactcccaaggggattcttatgcatccaagagtatgagaaccactgtattcaatagcaatgcttatttacttatcttcaaaaattgtttattttgaaataaccaggggcagaatactaaatagtacaaaaagaggaactaggctttcatataataaaaagtactgtatcttaactttgttttcttttttagcttaagtgcttcctaaagactaacacaatccatatgttcatggaaaacaaaaatccccaccagaatatgaggttggtcaggcatactcgagtgagtctgtcaagccctaagacctggtgggtgttggatccaaattccctcttcaacacagtgtaagcatccaatgcattcatcatccccttttcaaaatgcttggtctgtgcgtcttctttttcctgaccctgaatgagatatttttgagacttaaaaggaaaagtaaaaaggaaagccagcttagataaggtgctctttggcaaaagaataggataaaatgcattgtaattgcttctaaattagttaccttatctgatttgggtctgtctttttataagcaaagctcaaaacacttaacccctagttgtccagttgtagtgcaactaaagccactaaagctctgaacctagtgagtggatagacaatactgctttttgtgcagagaacataatttcacacccccctcctttgctaccctccattgcctggcaacaatgctgggcacaccatgggagatctgtaactacttgctgaatggaaggaagggctgaacaaccctgtagaccctgtagtttggggtaagaagacatctggatgctgacctgtacaccaagctacatgaagaatttccccatagttcattagagagtgggagcaagagggtacccagatgccacacagaccccaagaaagagctcatcaagtttccttgcctcttgggaactgaaatagttagcactgtggagcttgcctaaatagaatagaaaagaaaatgataccagggagatttctgctgaaaagacagacctatccagtttttcattggaaccatctccctgattcaaaaacagccccatcattagaactgctggaccaactcaacaaaatgtaaatacagctctatccagtaatgtgacattgctagaggcattccctggctttctgtaataaaatatgacctgagtcctttccaatttatgtttctagggtcttttgtctttttgtttaattaggatacttgttcctatttgtcatgcagttaggatggcgtctgtgtttacagattacagaggtgtagataaaatggggactctgagacccaagtgcaaaggtttgcatttttcacagaaattttccaaatgctacttttatagatggttgaaatttgagacttgagggatctctctttttagtcaggcttgcctaatattttggcatcctacaatttcgtatactttgtaaggaaaaagaaggggaaagtgggagggtgggagggtttgtctttaattgtcttctttgttagagaaatgagatgtggtgttttattcataggcaaagccctttctggcaaatcgtttgaaagtcagtgggattgtatagatcctctctatctattctattccctctacattagccattcctttccaaatcagaaaatgtctttggtagatggaattattgacctcatgcttcagctgtttttgggtccacaccctttgccatgtgatattgcagtccctcccacaaaaggcagagtcaatttttccactggctgtgacttgctttggtcaatgcagtgtggatggctgtgaccatgtaccagttctgcacttggactataagaggcatcatttctctctcagttatctgcttcccctcagcttgaagcctagaggaatacataaagaacccatagcatggggctaggtgtagccagacttatagcttgaggtagagccacctagctgagcccagtttagacgagacaatgcccgggtgacctgcagacccgtgggcaagaataagtggttattgttttaattaatccactgaagtattacttgttactcagtaatagccaattgataaaataccctcaatcccctcatctctccagtttatatattaattctcagcccaatatgttttggggcaaatggagaatttttctagccctttccaaatgctgcaagagctaattctatacattggatacagtgacatgttgctagacatcagctcctccttctaattaataatgattctgggagatggaccacatcttccaatctttttgtccatggcattgagcttgtacaggagatgaaagtgcatgcgtgactttgggatccaatcttggaaataagtaaagcttctgccacttaatagctatgtaactttggcaaggccattttgtttttctgaatctcagtttctccatctgttgaggttgttgggaaagagttggtagagagaataaagtgttcagcacatagtaagtgttaaataaataattggcagctgttagtatgattgtgtaataaataaataaagactgttttcttttagcattggtgacctgctcttctttgtaaggtccttacctcttctttcctgcccaatatggcaccttcctggggcacttcctggggcccggctgttgggtctgctattgcatgtcagcagtgtctcttccttccctattccctactcagtagctcctgtcatggtaggtgtcaagcagtggttagatggtgctctgcaattctaacaacaaccaccgcaattcgaataataagagataattattgagttctaactagattcaaacactacctggatgatgtaatttttaaagaaacccaatgacatggattgaattgtttccccctcaaattcatgttaaaaccctaacccccaatgtgactatattttgagacagggtctttaagagtaattaaggttaaatgagttccaagggtggggccctaattcgataagattggtggcctcattaaaggacgaggagataggagtttgctcttgctaaatttgcacagaggaaaggccgtgtgtaggcatagtgagaaggcggctatctacaagccaaggagagggtcttcaccagaaactcaccatactggcactctgatctttacttctagactccagaaatgtgagtaagtaagtttccattgtttaaaccacttagtctgtggtattttgctaacaaagcccaaatgactataaaacaacccctgtggtgaatactatcatctccattttccagcaagaaaactgaagttcacagggaggaagtgattgactcttgatcccacctctagcagatgttgaacccagcattcccaggccagcagccccaccccaggccctgtgcttttcatcactctgctctcctgggtagtgagttgctctgaccaccttagtcattgcaggcagctttcaggcctgggcagaatccatacagccaccaacgtgtagagacctgatgccaagagagcagagcataggctcgtgcatttcagaggtggagagaggcaagcatgtggcctgtgagcagggtttcttttgatcagggtagaccttttgggagcagcccaacgttattagagggaaggctacctaggaaaaagaaacctaaaacaatacattgctttggtgttttggtagcaataaattctttattgtgtaaatagtttcatacgatgcatattttatcaagttttatgcctgatgatatggtttggatttgtgtctctgcccaaatctcacgttgaattgtaatccccaatgttggaggaggggcctgatgggaggtgattggatcatggtgattggatcatgggtcactcttctcatgatagtgactgagttctcatgagatctggttgtttaaaagtgtgtagcacctcccccttctctttcttcctcctgctccagccatgtagcatgcctgcttccccttccccttccaccatgattctaagttttctgaggcctccccagccatgcttccagtgtagcctgtgagccaattaaacctctttgcttcataaataacccagtgtcaagtagctcttacagcagtgcaagaacaaaccaatacaccttgcataaggaacacagctggttgtatgatattattaatactaataaaagtgtaacaaggcatttttgaagtatctctcattttctcctcctcagtgatgtcagcctctctccctgcactcattccaccattttggccccagcaaagactccagagcaaacaacacctcggaaaggagaaggaggaaatgaagttggggaaattggtgtcctacaggaaagggtaggaaatcccactgtttctgcccccagtgaaaggtgaggagaagagaagtggttaggggttcatgcccttatgtccccacgtcctccaatctcagagtggaagcctgaactagtgggagagggagacactgctgtgcggtggaaacatctagatagatttaagaagagttgagaatctgaaatctagaggctgccttctttgggtgtggcctggggggtcctgtgtaactctacatcagatatttgtcaacctcagcaccattgacattttggcccagataattctttgttgttggccgtctgtcccaagcactgtaggatgtttagcagcaactctggccagtagtacctcccagttgtaacaaccaaaaatgtctcccgatattgccaaatgtctcctggaagcaaaattgtgcatcccaccccatgatggtactcagaggtgctgggaaggccagcggtactgcagaggtctggagcaagtgactggatccatgattgtcagtgtcatcaatgccagtgcaggacgaagacacactcactgcagagaaaagcaagaaccagaggtgggcctatgggtccctggccttcacctcccatatagaccctctgactccatttttggtgagaagtagagggaagggaaaacatctagatgacctaaacaagacgaagtcattcccccaaaaaagcgttcaagccagagagattgaggtcacttaagttgacatatttaaaatcttcccttccctgacgagtggtggctcatgcctgtaatcccagcattttgggaaactaaggcaggaggatcccttcagcccaggagtttgagactagcctaagcaacatggcaagaccctgtttctgcaaaaaatacaaaagttagctgttcatgctggcatatggctgttgtcccagctacccaggaggctgaggtgggccaattacttgagcctgggaggtcaaggttgcagtgagacatgattgcactactgcactccagcctgggtgacagtgtgagactttgtctcaaaaattaaataagtaaactcttcccttcccaactacccacagaggtgagggactcctgaagaatattacatccacaatggcaaaattagaaaactacattttctttgcacatctgaaaagcagtgtgaatccatgatgtggtaaaggtagtaataacaatagcagctaccatgtatcacatgcttactgcacacttagtactttgcagggattgtctcctttaaccctttaaccagcagtcctaggaagtagatgtttctattgtggtcttttccttacctatgaggtccaagtgatggaaagtgatgaggcatagatacacacccagtctaggtgattccagagcccagatgcctcatgactctaccacattgctttcttactgctgtagtgctttgtatctatgtctgtctccaattcattcatttattcctttgtggtacttgtagaacaaatcgtgccattccatttattctccatagcaatgtttaaagagagcttttccagcatttaattcctattgagcagggatttctttctctgcagagagctcaaatactctcaagaactgagaaggaactaaagggacatttgttgtagtagattattcacggtaaagaatttgctgcacccacagcaacaaagaactgtttgtgtgtagactgcaagggtcactctgaataccataagcagagcattgaacaatgaacttatctcctggtcccgggaagtggtccacagtaacaatgctttgtagatagagctactggctactcttaggcttccagtgccactctttttctgaaacagccaaggacttagcattttcaaagataaaagtcaattccattaaaatgaatccttttttttttttttaacaactaatagtttctatttaaaaatagcttttggtctatttacagtgtcttcatgtccctgacctttcttagcaatcagcttcttgtctgggtatggagagcagaggccatagaccagtcattggatattgaaaagtttggttgctttaagatggttgcatctttaaaattactggtgttggtagatttaattatgttcgaagataatttctcttttctatttaaacactgactatggcaaattagaaatggctggaaattttctgacattccttccatggaccagtgggttttagttcttctctatttgaacccatgttggcttgtgacattttgatgaacagaagagagtgaaagtgatgcatgccaaccctgggcctaggctttaaaaggactggcagcttccactttgttctgttggaacactgaggttccatggtaaaagtctgactaccctgaggctgttgtgctgtgagaggcacaagccacatacaggggctccagcagataaattgtcatggtgggggtgaaaagaagttgaagaatcagataggtgagcacagaagccatccagaatctcagaaatggatcctccagtcccaggtgctacagttgacaccaaggagcagagaggtgaatcccctcgctgaacccttcttagattcttgacccacaaaattgtgagccaaaaaaaaaaaaggttgctctaagttttggggtagtttattacacagtaacagataaccaacttttcaatttctaaagtttgttacagcagatcctaagaaacttctcaggtatccagagatgtgaaaacaccaggactaacagctacttgtcttacagctagggcattaaccattattttaacagctttgtgactatcagataaagccattttttgatcttccaatttcttaagaagatatttattactgccactaagttcagaattgtgtttttacatgctactataaagacacatgcacacgtatgtttattgcagcactattcacaatagcaaagacttggaaccaacccaaatgtccatcaacgatagattggattaagaaaatgtggcacatatacaccatggaatactatgcagccataaaaaatgatgagttcatgtcctttgtagggacatgaatgaagctggaaaccatcattctcagcaaactatcgcaaggacaaaaaaccaagcaccgcatgttcgcactcataggtgggaattgaacaatgagaacacatggacacaggaaggggaacatcacacaccggggcctgatgtggggtggggggaggggggagggatagcattaggagatatacctaatgttaaatgaagagttagtgggtgcagcacaccaacatggcacacgcatacatatgtaacaaacctgcacgttgtgcacatgtaccctaaaacttaaagtataaaaaaaaaatgtatttttagtttctttctcatcacttttaccccaccctgtaccagccctccatggcagagccccttgtgaggggactcagtccagccctggtagccagggtccttcctttgtccttctgccaccttatccatgagcagagtttattcaacttcaaacgtagagagggcacaaaggacattgtgatttgtgttttcaagtttccttccttcagaacaggcacctgagctgttctactgggagccaagaaagggcagatcccaggacagcaggattcgggcaggttcctgcattatttgcctcttgacggggcgccctggtccctcagattcacctcatcgtgtacacagctgctacatacagcaaaccaaagccctggattcccccatggcacacagggctacatttctgtggccacatgttccttgcaaacactggccacataacctggggaaggggcaactcacaggataatccagttcagcagacttcctgcagtttaaactgctcttggtggagagacctttcaagaggagacccttttggctttctctgtcatttcctagctgaggtccaggaaaaggagtctccactacatttgccctagtcctactcaaggaaaagcaccttaactttcagagactaaatagttttccaaaatggaaaagaaaatccacctgtgtaaatgatgggaatcttatgctcagcgagatagttgggttgggaaaaacagttaaaactccaagatgaatagaaggatagcaaaaagtgtgtgtgtgtgtgtgtgtgtgtgtgtgtgtgtgtgtgtgtatgtatatatatatatatatatatacgtatgtatatatatatatatacgtatgtatatatatatatatatacacgtatgtgtatatatatacgtatgtgtgtgtatatatatatatatatacacgtatgtgtatatatatatatatacacgtatgtgtatatatatatatacgtgtgtgtgtgtgtgtgtgtatatatatatatatatatatatatatatatatatatttcaagagagaaactcctaaaccttagaccaacattttaaaagagtggttcaaggaccgtttacatcagaattacacaggaagcctgctaaaataaagattccagagctccattctggacctactgaatcaggctctctgggggtgaaaatagaaattttcagtggctctccaagtggtgcatgtgctcactgaagtctgagaatggttgccttagatttattttacaaacaaatttcatgaaacattttttgagaagtcgatacaaatatttattataaaataatattataattatattaactgtaggaacatagagatacatgttagttttaatatgtgagtagtgttatgtcatatattaatatctatactaatattactattatccagttaaagtaatactagctggataataacagccacaataataatggttaacatttatcgagcacttaccaggtgttgtgttcagtcttacacaagtattttctcatttaatgttcaccacggatactttaggtgctctcgcttggcatatcaggaaatgaagttacaccaagccagtaaatagtgagatagtgatttgaacccagagcccattttccccaatcagcaggtcacccatccttacaccctggggatcagaccatggtctgtgcttgggctggagcacttgatcacattctgccttttcttatagtgatttatgagttgccagatcctggagggcaggatccagtttatttctgaaaggcttagaaccctaagccctgtgccttgaatgtacagataagcgtcgttcaaatgtctgtcggaatcagttaaaatgccacactccaaacagggtcagacttgctgatgacagtggcagctttcgtgtcttgtatgcagttgcaggataggtgctgagtatttacaacttatttctagtgatagcagaaggtcatccctggatgacttctatatttgtttcacccagtaagtaccaaagcaatggttacctaaacatttgcaaagtgccaattagatttcagatgaattccaatgaactacataataataatgagaataatgactattgagcacttatcatgtgccaagccttatgctaaatcttttgcaaaaataatttcataggccttactgaggtgggtattattatcttctccccgtacatgaaagttgaataacttgcccaaagtcacccagctagtgagtaacaaggtttggatttgaaatccatctgattccaaatagtagttttactatttttcactattctaatcaacttatttttcccttccctttcttctttctttccttcaaaaaaaatgtattgaatgcttcctctgtattaagcctgcattaggtgaataatacaaagatgagcaagaaagacatggtccttaccctaaaggggtgttgggggaagtcggaagatgaaatgaacaattgtagcacacggtggtgaatgctatgatagaatatccagtgcggtaagaagagatgcataagaagccatggctcctgggtaccttgctcaagcgcagttgaattctcacggcaactctctgacctgtgtgtcagtagctgcatttgtatatgaagacacagtttcagaggtcagaacacttactcaaggcttcacagacaagtggcagggctactattcaaacccctatctccaaaacgcaagggtcatgctctccttgctagaccgtgtcatctgggactagcaaaaagtaaactaaaatggaatggctgcctttctctgtggtgggtgatatgttttctactaagtaaaattgagttaaactaatttttatcctgaagtgtgtggagggataatgaagtcccaaattcctgtgtttgagtgagcctctctgtgaacgacacagaggacacccttaagataatcaacagaccccatgttgttatttgaagttccgcagtaatggagtttgctaggaacattattccttagttcatatttatttagatttgaaacctgtcctaccttggattagttgcaagaatcagtcgcttcactttggactgtgatgaactgaccaaagaagagtactaaatactgaaagaaatacaaagaggccaaggtactagactgctggtacaaaatcaaaaaggtctggtcccaagtggcactcaagttttaactgttgacttgctggaagttttggaggcatttaaccacttgctgatactctacatttccttttaaaaaatcaaatagatataatcgtgtgaaatggcttcagaggagggataagccatccctctgctttgagaatatcatgtataccctggaagaggagatgaaggagactcagaggcaatattctcttttaaaggcaaatagaaaatgtccacttctccaaacatactgttcataggattccagggctgcttttgaaatcttgttgcaatgaccaacagagtagcctcagaatggctaaggaaagtttatgcctattgatcaaaatcagcatctaagctgtagtagaagacaaggttcacgtgttttcagagcactggggctcaataattaaccttagcttctttggggtttctgaagtttaatgctgcagtggtttcagaggtttagcaaaggtttttcccactaagtttctgctgaagcccgtctttccttagcctgtggactgcaacattctgaagcctctgtgctccacacattgcacattctgaatggcactctgcattttagtggtgtctgattgcacttttaaaaaccattcctgtgagcagtttttggacaagagacaactaatttcctgcatcatgtgtggatttccagaacaatgccagaggggctaagaacactctttctctgttgactacacaaaaatatatttaacatttgcccagggccagaattttgtctctttcagtgtattaaaaatgctatcctggagagctgatattaaaagaagaacatttaattagacaagtgcttttgaaatcgtcttttgagttctgagatagcgctgaagaataaagggccccaactggcagggaccctagtcacctgaaagcaaaatgtaaacagaaaattctggtttttctctgccttttctccaaaccccctcttctctacaactttcctattaaagttcaggaatagttggttgctgcggtagattgctaatacatcttgctaaagtgaatgtcattttcatctcccgagaactccaaggaagcccagactcaggagaacgaagccatcgttcatctttcaatgctcaataacaggatttagacatctcaatacttttgaaaaagaaggccttttttttgtaagaaaaagatgaccctgaacaagactgactacagtttcttatgatacattatgtgttgtgaagttaagccagggactctttagccttgcctgatataaaattagggatacatgggacaattctacaagtaaaaggttataaaggtggcccacaggctagacagaccccataaatgtgttttgttttggcctacatacaattttaatacagtttaaaattgatttttagcattttaaaacggagagattatctaaaaagaaaacagaaaatctttatgaccttggattagacaaagatttcttagatagaacatcaaaatcatgatccgtgaaagagaaacgaagataagtggaacttcagcaaaattaaaaacgtatgttactgaaagccacttaagagaatgagaagacaagttacagatgggcagaaatatttgaaaaccacttatctagtaaaggacatgcatacagattatactaagaactgtcaaaactcagtaataagaaaacaaatggccccataaaaatgagcagaagatttaaatagacacatcaccaatcaagatatatgaatagcaaataaacacataaaaagacactcagctgaactgaccattaggggaatgcaaattaaaaccacagtgagatactactacacaggtactagaatagtcaaaatttaaaaagactggctataccaagtgttagcaagcatgtagagcaaatgggactctcacacattgctttaaaagaatcttttaaaaagagaagaaaagttgataaagcttatgtaatttgccatagctaaaatcacagggctcaaaaattgagcagagcatttcccaacatgatagtcagtcaatccttggataaaggttttctttatgctagaactctctgttagcaggactcttagtcccctatcactgcttctaggatacctgtttgctttaccagggcctctggacaagtccattcagactgcctagattttggcacagggagtccagaaattcctgtgctgatctagacaacaattctacccttccagcctcccagggccacattaggacttccctgcttttgagattgatgtcttctgtttatggctcagccgcctcatcacatatggaggctcaccctagaagagggtcatcgtctcttctcaggccgacacagccccttcctttgaagttcagagattagtatagtccacaagctagcagcacatcaagcgactgaaatgtccctcaaactctggtgtgctttctgtctctctataggcgaattgtaccacccttcctcatggcaccactctctatttagccaggttctaatttctgctgggtttctccttccatcttcaggtactcacatcttatggaacctgcctttaagtccttctgtccttatttttcttttttaagagatggttttataaggttggctacagggaaatttcccatcattttgaaaattaaagctctgttgtaatctcagtcttctttaagtaactgtctccataccccagaacttagtataataaaaaagaataattttataaaaagaacatatggaagattaaatgaaaatagtcaataaaattattaaaaagaaaagcagtgatattttactaaagagtaatcccctagagccactgtagttacaataatgtagtattggcataaaataccaatggactagaatagagagccaataaatatatcccaatggctatgggaagttaacgtatggcaaaggtaatatttcaatttcagggaaaaaaaattgccatctccaatggaaaggtttcacctgagactggggaccatccttgactttctgcttggatgaaaagaagtataaatgctgcttatctacagaaatttctgatatttctgcaaataaaaaccatataactacacaaatcttggagagtgaaagtgaaaaaggggtaactcagcttgaatctgtcatggccagatcaaatttagaggaatgcttcactttcattgttattattattttttgagagaatagctctttgagatgagtgtcatttggcaagcataggcatgcatgaatacatcctccctcccgtgtttgtggtgggacaaaagagtggtttaagtaaagttttaaaaacctaaagaacatatacacagaatcagatatgatggctttaaattaatcggatagcttttcccagtggtagctgggagcttttccaataaagctaccactatctgaaacatatccgaaactcttcttttttgctagcttttataaaacctgcattggattattttgactatcttcaagagtgaaaaaaatatatttgctctggagtttgattttggggactgttctgggttgaatagggccctccaaattcatggccatccagaacctgtgaatgtgatcttatttggaaatagggacattgcagatgtagttattatagttaagatgccgtcatactggattagggtgggccctaaatccattatgactggtgtctcatataaagaagagaagacgcacagagacgagacatccagggacaacaccatgtgatgacgatggcagagattggagtgatgcatctacaagccagggaatgtcaagcattgctggcaaccagcagggctaggaagaggcaaggaaggattctcttcaagagcctttagagagagagcatggccttctaataccttgatttcaaattactaacttccagaattgtgagagactacaatttttgttgttgaaaccacccaatgtgtgatactttgtaatgacagtcctaagaaacatacacagaaaataagttggatgactgaagagtattcatgccaggcaattctgctgttggttaaaaaaatctatgattaacccaacaagactgattttatcttttagatctgaaactaaacttaaatgtcaccactaataatggctaactttggtggcaagcccactctgactagcaatttttatgcattatctcattgatcctcaaaaagctgtagagtggcatcttatctccattttacaagagaaagaacctcaggagctgataaattaggaaacttgcctatggtcatgcagctggtaatggtcagaattcaaatttatggttgtttcactacaccacactgccactcaatgtctgaagatggcttccaaaaatgtttgtgcaatagacatttctctgaactaattgtaccgtgccctgaggcgacggatttgcagaacagctctcttgaatagtaagtgctagtatttttgtttaaaaaattccctgtcattactttatagcctcaccttgtctatattatatgggattctttgcttgcctaacttatattatcactcccctgggagggactgagacttcttttccatttcatacagagtttaagaagctgtcaacacttagtaaataatcagtatttaagccagcacagtgatccctacaaattatgaccctcaggctctgaagatgaagaaaatgttgagttgtgcaattttccactcttcaaataatcttaatagtgtggatcatgttagtcctagtttaatattataatccaaacaacatttgactctgaatgcagagcgaggcttgggaatcacccagaccagtgtattcagagacgactcatggcagctggctgggctgttttgacctttccagtatttgcaaactggctgggcattttgtccctcctctgcctacatgacatttaccacgcacataatcacagaacaattgtaacattttaatgtttttctttttcttcttctttttgaatcttaaggactagctctgccttgtgggttaggtagattggggacttgcatgtttgttgctactcgaattccagtggagttgagcttgagagtgtctatttcctattcaactgtgaatcttcattgttctgcgtcctaaatcaaagaaaagtggctcacctcatgtggaaagggttattttcaaactccttgtgggactgtgttccccctttttaagtgtgagtgtgtctgggtgaggcgagtcccagtgtacattccatggcactgaaggaggttggcctatgtgtggttttgaggatcaatgctgggttgagtcaaatcttaaaagtccccaaatagtagtatattttctaagaagcatttcaagactgtactgctgatttcatgcctccttcttcataaccctttctttttgtgaaaggaaatctttgacttccttctttctccaaatttgcctccccataaaatcaattacatctattctttgctttaaatatcgatttcatcgtcccatgttttgtcacactttgtattaaaaatcatttaataatgagatgctttcaaggaaacattaagaattcttggcctgtcattcaaggcccactacaatcctcaattctctcccaatgcatgcatgcatccatccatccattcaacaaaactttactgaatatctaacaagtgccagacattacattttgtgcttagagtacagtgtgatggagacaggcctggcctctgtcctcaagaagtttacagcatgttggtgaaatggaacactagacatgatcatgcagagtgcagcaagtgctatgagcaaaaagcacagggtgtgctgtaatagaacttgggagggacactgaagacaagggacaatttgaggatgaagtgctatttaggctgaaatctagtttgtgaataggagtcagccaggtgaaagacaggggaaaagacgggataacatgtgtgaagcccaggggtgagacagcataacatgctggggaattgaaagaagttcaaaatagctgaaaggtagagtggggtagagatggagctgagaaggtggggagtagaggaagaaaacaggggccagatcctactggacttgaaagcctggtgagttaggactttcttcaaggtcaatgaaggactgctgtaggattttaagcaggagaggaaactgataagatttgcctttttaaaacatcactcttgctaccttgaggacagtggatcagaagagactggaaatccagttgcaagctgcaattcagataagagatgatggtatgaacaaggagcatgtcagggaggacaagatatgtggacagattcaagatctttaaatgtcagtctatccccaaagatgtcacataataattgcattcccatcatacatttccctgccaggcaaaccttgttcctggccatggattcaaattctacccacattgatgtcatcttttatgatgccttctctgaccctcagtcctcagaatctatataaatggttgcaagacattttttgtttcccttacttcaccaagagaactgacttgtaatatcagttcttgtttccatagcatctttctcttctcaagtgggtagcaagcaagatgaagagaaaccatgttgatacatcattttttcccctcctcttggtacttcctacttcatcttgtgcaaggtgtgtatgtaatacatatttgtcctgtgtgtatgtaatacatatttgtcctgttgaccaactgtgatcttgctctccttctaaaagttcttcagatggttctcttccaggtcttattttaaatggtacaaccaataatcaatctagtaattcactcattcatttatccatttgctcatacttttaatcattcacttagcatatattaagtgtctgttatgccgtaggcactattctagggctgattctctgcttttttactgagctgcttatttcattttggatactatgttttccaacatagagacagacttcctctcctgtttatcatgtaaaatgaggattgaatgtactagaaatgtttttctgccataagcacaccttagcacctggtacccagatgagctatcttatggcatgggtaaggactaagttgtggaatgactgtcggtttcccaggtggagtgttggctgtctgtagttggcacatgtcttgcccaagggacccaaactttggaatttggatgtgcactaggctgaattaatcctgctctgttttttaaacagttcctgatatttgtccaatagaagcagaacaaaatagtaccagttacttcaaatgtgtgattcagaagaatgtgagtcctaatgcagagctcttaatgtaaagaaaaaattttggcttttgccactgtcatttcacagctctcagcccaccatcgccctgcattctaccctgccaggaatgggcactggactagttgcggtttgggagagaagcttctgagatccaagattcttctgcgctggctttaaagtgatttttatgctaacattgcatcaaagcccttttttggcaaataaattgccatataagattaaaaataatttggggggcaggatttctaccaggaattgaacaaacgatgtactgtctgaagctggttccaaattcctaatgcatctgctttgtacagtccccatttcataaaactacaattcctcatttgtctgagtgccttctgcttgtgtgctagaagaatcatacccctttatttctggccctacaggcaccttcccgagtttgggaaaacttctcaaataagaacccacagaagccctaaataatgcagttgttgcaagcatccttgttcaacatttagcaagtggtcccgtgctttttctgatcagggcagatataaaacatctgtctcctcagccagtttcccaaggagagttctcaatccctgctccctgttcctgccagagccgccatcttgaattcagacactttttctagttttctcttgaaactccccagttgaagagatacggccacagagcatatttagatgtttcttttgtttggtcagttatttttatctgaaggtacatgatgattctgtggttcaatttgtagaaatttctaggatcaacaggctgttgtactgattcttcatttaactgatcctagactttttccccgatttgcttatgcctagtttaaatttaggtatttcttgatttcgtttgtttatttttgatactggatctctatatcattaggtcactttaatttgcaagtaacaaaatcctaacctaaactggcttaaacaaaaagggaattcatgggcttacacaaactggaaagcagcattgggcacagctggattcaggactcaacaggataatcaggactcggtttctctccatttctcggctctgtcttctgctatcattggcttaagtctcaagtttcatgggcagtagttgtagtagtagtagcagttggcagtagtggtagtacattctcttaactttcaggttctgttaaaagaagtaagtttctctctccaagatgttcaacaaaatcctgaatctgcctatcattggctagaatttttttcacatacccgtctctggaccactcctgagtcagggcagggaagtcaggcaaagagccctagatacagcaaaacagagctaagctgccttttactccaaagtcatttggggaactgcaactcccttttctctttcctttaccaatataagactcaggtttggtgtgaaggaaaatctgaccctgtaaattcatttaaaactcagttaacagacatcgcgccactgcactccagcctgggtgacagagcgagactccgtctcaaaaaaaaaaaaaaaaaaaaaaaaactcagttaacagggtctgaatgaaccataatcatatgcatatttatgatatttttacattcattggtattaccttgtttttctgtgtgatttttgtggcattgttttattcagtttttaccttcattttcattttcagttttctttccattttatgccttattttaaaaacaaaatattgtacagtgcatttaaaacatgttcctttttaaaaattaatatgtcattttgcttgctatttgtagaggctgaacaaatgaatggaatgtattaactttcatatttttataaagtttgtataattcaactgttgaaagagtggttagtattatcttaaatgtgacattttgcttgacttgaaagtaagcaaaaattggtgtacaaaatcttatatttgagcaatatggtttagtcaaggtatttgtatttaactcaatcaaaccaaccaaaacatccttctttcttctctttgctatcctaatccttacatgccaggctgagaacaccaaggcctatctatggtaattattcttaatcctatttgcaggcctaaaattttggttacagcacacatatgaattttaaataggagtgagtaaactcctagtatctctattattattattattactattactagttatattaattatagtacaattaatattactattagtagttatactaataatggctacctattattgagtgcttactatatgctagtgaccaaagcacttagatttaaaatttcattgacccctatgagatggttccattcctgggtgaggaaaccaaggctaagaaaatagactgaacaattcgacaaggctgggagtttatataactagtaaataacaaaccttggaatttaaatccaaatctgtctaatttcaaagttcctggtttgtgtttaggtctttctaactgacagatttagtcttcaggtctatggaagaaaaataactttgccttgggaagtccttttccctagctctgatggaccaactctggagaggggcttcgcttaaattgtaaataatgtgtccatgatcactgttttgagaacaaggcaccagttttgtgcatcagacagattgcatgttgctgctcctcacatttagaccattcattatctgttagcccttacatagggaaaccatctgtaatttttttttttttttttttttttccgagatggagttttgctcttgttacctgggctggagtgcaatggcgtgatcttggctcactgcaatctccacctccctggttcaagcgattctcctgcctcagcctcccgagtagctgggattacaggtgcacgccaccatgccaggctaatttttgtatttttagtagagatgatgttttgccatgttcaccaggctagtctctaactccttacttcaggtgatctacccatcttggcctctcaaagtgttgggattaggtgtaagccaccgtgcccggcctcatctgtaatttttgctacttattcattacttagtcatgtttgggaaagaaaagatcaaggatattgattaaaatgagttggaaatgattgtagagttcataaaagctatatatctctatatcgtatctttgcagataaaatagaaatgaatcaatccattcctgggttttagcatatcaataagaataggaaccctgcattaataataggctccaagtctcaaggcatcaggctacagaagctcttccaggaaagtagcgtttgctcaaactgcattaagcagtagagggaaattttttggctaatgtaattgaaaagttcaggggtagttagcttcaggcacagctggatctaggggctcaaataatgtcataagatatctgtatttttcctatctttcatctctgattttgtgtcttggcttagtactctagaaggtgctccttttaagtaatataatgacctcccagaagcatctaggttataatctatcagctttcaaacctagcagaaacacagaatctcttttccaataggtctagcaaaaatcctgagaatgacacttattggattggcttgggtcacacacccacatcctaaattaacggctgaaagcagggaagcaaactgacctggtgtgagttgtatgcttttctctggagcacagaagtggctcaacccctcaagaaccataaatgctggaaatgtggagaaaaaatgattttccaaaagaaaggcaggaagaggaatcaaaggaataaaccaacctgctaaacaacaacaacaacaaaaaaacccgggtgtttagcatactttctccacaactcaatgtctttatctggaaataatccaactccacgatgctgcagtccctgggtacccactgatgtgggggacaggcagagaaaggtgtggtgtgtgggctgttgcccaggcgctggttagggcaaccaagataggctcttggcattctagcagttagttcagtaggcctggaggctacagtaattatgagtgagtgcagctcaattagggggtgaggggtgggatgggagacagcaggatcaggcctggggaaaaacagattggttttcaaacatccatttggggtggttattaaacaagcctttagaacacttctaagaccagtattgtgctacaccctgctgggcggcactctcaagatatgacactaggagataacacctgctgttactagtgactagaaaacaaggaagaagcagcaaagttcgtcaaacgaaacaggacagtcagggacagaccactcagttaattagaggtcttctgaaagggtatggactcatatattttgcagaaataaccttttcatcagttgggttaaaatatataacagctttgtggtttttgttttaccatttttaattaaaaaatgaaagatcacaaccttcctcaaaacatcttgtcttcccaatggtagaaagtgatcctcactctaggagtgtgatctgatacagaaagccaagataactttggttcaaagcaggctaacccgggtacacattactaggtaatagaataaattacaggttattcagaaaaataaaacagagggtctcagctagaaagagaaacttgtagagatgctcaaggtctggaactagagcactatagagcaaatgaaaattcttatggcttttctaaactcagaaatttaattcagtttgatactcaagaaaatctcttattgccttcaaatgaaaaaaaaaaaaaaaagagggctgggcgcagtggctcacgcctgtaatcccagaactttgggaggccaaagcgggtggatcacctgaggtcaggagtttgagactagcctggccaacatggtgaaaacccatctctactaaaaatacaaaaattagctggtcatggtggcaggcacctgtaatcccagctactcagcaggctgaggtgagagaatcgcttgaacccaggaggcagaggttgcagtgagccgagatcacgccattgcactccagcctgggcaacaagagcaaaacctcgtctcaaaaagaaaaacaaggaaaaaaaaaataaaagactcccgattttctggtttcttgctctgtgattagccccagaaagctgggctcctggggctaactgatgccacctggaatgggtgcccgcgcactatggtggcctgccctcagtatggactaaaggcagtgcctcctccatgctaaagcagatgctggcccaagcaacagccctgtgcctgtcaaaatataagctaagtatggcatatgagactagagagggatcacagaaccttagacatttccaagaaaaatgaataatataaggctaggtctcggatggtctgcatcttattaatcccccttttccacaatggtgggcgggctgccggggatgtgggctgcagatgggaagcacactttcctggggttttgttccattctccaggcccctcctaggcaccagaagtattcatttcctggcatgagcagggcttggaacactggtgtccaatttgtccttgggacagcttggacggctggctgggccctggaatatttgaaagggccaatggacacccactgttaggataagctatgcctgacccagcctcccaggcctatctcttcacctctggataaccagtgtaggccccagctgagctctcctacctcaattcccctgcctctaactcaccccaaacaaggtggctggattcttcatcttaaatcaccatttaaagtggtgagctctgtctcaaaagtcaggaagccttcctctttgtttccaagagagcatttgaatactttcatctcagacaggccccaccctcaagagccttcaatactctcctcatgcttccctccaaatctttgccaaacttttcccacagcctggaatacttctttgcctcaaccacctgcccccacctgtcatttacctgccctatccagacatccccagctctcaaggaatttttcaacagattgtttatatcatccagtatttgcactacttcttgggtaactaattgtgtcctattttgtatttttctttttaacatatttgtatacacttatgctgatgagaccatgaatttcttcctcttttgtatctccaagagggatgaccacatagtaagtatttaataattatttgttgagtaaatggttacataactaaatgatattgcatggcactcaaaacatctttgttatttgagtaaatcacaggttagaaaaatcacagcctagcctcatcattgctatttccaagtctaaatatgatctatttagtaggtcaacatgcccttcctaccatttattctcatctgtgcaaaaagaggtactagaaatatctttcatcaatagaattttcctaatgttcctactctgcttagaaacctacagtgatttcctattagcactcatgtgaattacaaacagctcccctgacttctctggtcctgtgacttcttgctttcatcaactcccagcaaacttaactgttggtttctacctaattgtacttcccggtttctacctcattttcaggaagggcacatcagccagtctttgctgcttccctcccttagtcatatggttgctttacctgactcctgggcacagacctagggccttctgaagttttatctttaaaagccatataaaagctcctcttaagggggagtaccaaaagggaggaatagaactctaatttaccattcagtgtctgtgacttgttgagatttaaaaaaataaacaaaagcaggcatatttaaagcattaaagacacatcaattacttccagcttgtgctatttccttttgaactctcctcttatgaatgttactgtccccctgctcctgagctcctttgcccccttctgggatctgagcccacccttcaggggaatctcctctggggaatgggaaaccaggaaaagtgtgacggtccctgagctgagctggtaccctgatggctcagcacaccttccctgctactcccttcccactgaacaagctggtgtccatctgcagtgaagggccaagggtggacagggcattctgactttcttggtgactgagaagcataaaccctctaattagcagttcccgattcacagttgaggaggctgaaaatccagaaagaggacaatgctggtgccagtagttcatatgaatgagttgtggcagaaacacatccccagccctcaattccacccacggctatatactttgttttgaaatctgctttcctttgcttggagtcagctcgaagaaggagcaaagcattttaggattttggggtgggcagggtcaagacttcaggtgccattaagccaagggactgctggggtcagggctgcattctatgaacttccctggcacttcggtctcatgcccaagacagtgctcaaattatagtggatgctttcagctgcatgaaatacagatatcaaaataactttattattaaatgacatctgagaagccagtcttcctttgatagatgagaaaactggagcctaacaagtttacgtaaaatctttcttggattttcttattcgtgtatttattcattctgtaaatatttatttaatgctggcagtgtgcaaggcagagggtccaaggactccagtgcatttgtaatagagctgggaccagaactcagggcttctcgctcctgccctagtattgtttttactacaaaatatactaagacagcatgtttattcatgactggacctgaccatgtgttgagcacctactaaatgccagttatcatgtatgggtgtttgacataattatctcattcaattttgacagcatccttctgaaagataggtggtgttgtcttttgtttgtgatgaggaaactgagacccagagaggttgcaaggaaacctgtgttgggattctgcagctagcaagtgacagagttcggattgagtttgaggtcgtctaagtgcctaatccaggctctttccactctggtgcatttgcttctcaagtgctcccaagactccacctgctcccatcaaagggctgcactccttcagaccgggaagctttgtatatgcatccccctacttggcatgccctcctttcttcctctctacctttgcagtcccacttgtccctcggggctcacatcttgaagagctcatacttcaagaatgtttagagatgaagaaatctggccaccaaggtttagcctagccaagcttgctgtttagagagccatcattccttcaaatgcctttcattttgtcaagttttactgacaagcttaggtcaaactggtcagcagtaccacttatataaatgtttgtcactggtccttttgaaaatgaatgtagaccttgaactgtcgtcttttcttttttctagaataaactgcttcttgcctgggggatggttatttcccattatgcagccaagtcagagaatgctctgaataatcaaatattccaatgaatggagttacattacatggatcagcagctttcaaggaatcagaataaaatacacttaacacaaatactgtactaagcataatgtaattttcttgctggttttgctgctgatcctgtgagcatcaattatcacttaacagggaatcaagtaactctgccactaacctgcaaagcgattttgggcacacaatcttccattttggagtactgtttcctcttctgtaaaacaagcaagttggatcagattgtgtctggtgtatgtgttgcacatgtgtcatcattctccactcctgagcccatgtcagacatcactaatcaattgtggcacttttttttttcctttgatttctgacggcctcagcatgcctctaagcccagtgttccagcagcaaatccgctctcagtagactggagtagacacatgaaatgaaatctatttgttataattgaactagatgatctccagggtctcagcttttatgagctgcctgaggtgaatgcatgctggatggaaagttgggtggtagatagtttgtactatcattaagcattaagtattttaccactcagctgaggggttgggttttttaattattatttttgtttgcctccatttcactgacacataggcttatgtggctactgaaaactgtggcaggaattatatctaaaattctggtgggtagattcaagtggattgtgacaagggaagtctggtcagcttggctcgtcctaggattcaacccaccttggaagctgtcctaatagaaacaggcagaaataatccaacccacatctgagttccctcatcccacagcactaggctgggacatgtcattctgtgttatggctagtaggatgtgatatacaaacctcctggtagattataaactccttggagtctgggaggaggctctagttatcatttgaattcacagcctggtcccacaactaataggctgtttaccccctgacaagttactttctctgcctcaattttcaatttataaaactggggaaaaataataataatataccttaggggtttgtcatgaacctcagatgacaacattgatgtaaatgcttaaaagacctcccggaatattgctttttttattattataaaatcacagcctacacaacgcctgatgaacaagtgttactagcatgtgttgactgatttagttttcaaatcaccatgagaggtaagtgtctaacctttggaaggactgatctaagaaacagcagggaaacaaatatgacaggatctgtccacaagactgtggggaattgaacagggcagagttagtacaaagggtttggattcatctgctgctgaggcaaccagaaatcaattcgagggagtcacacagcaaaggaggcagctatagtcagcttcctggccttaggagagatttttattcttttaactagcatcttccacttttggaagcatagtctcaaatcatgaaaatactcttgtgagagcacatttttatttcattgtgtcctcaaacaaacctgtgagctcaagctcaagctcaaggcagtatcacccctatatgattaatgaggcaaagctgaggcccagaaaggttatgtaatttgcctaaggatacatggcttgtgagggcagagcctgggctgagactttcagtctcacaatctcccccatcctccttctatcctgttctcttcaggaacatatttcagttttaggtttcccggcagttttttctaaacactatcaagtaaaagcaattttattagttcattgatataaacaatgagttgataagggacttttattttccccaaatcctccaaccctatgtcaaatgtcagatttattttttggctacgagaaaccataatgtaaaaatgagcaaaaatattcccacaaaaggagtctgagaagtatacctgggcatgactgtgaaaaagaggacaggaacagcatataatgcttaatgaaacgtataaaggacagtactggattttatttgaaacacgatcttcatgttgctgccaaataaaacaagtatgaaataggcacaaaccactgttggatgtgtttctcaaaagacttgggcataatgtgaaaccaggagttcacatgttgccctttaaataaaatacaggaaagtgtactttctatggagatatgtcttttagttttcttcttcactgtagagatagatttgtgagggaccattatcactttaccccccaattctcttggagactagggcatacagtaggcccatttatcacagttgcacctctaccgtgacctgaaatgtgtgaacctaggttatcatgtttgcacactcgagagccccaactctccttatgctgtggcttcagctgattaacatcgtctggccccaaggagagccacagactggtaaagccaatcagatcccttcttttaagagttttaaatcacagagaagaagattccagttggtataaatccttgagtgaggagaaactggagattgaggctaaattagcaatattggaccatgcccaaaatgagcactcagaaaaaaaaaaaaaaaggtaaggagagaaacagagaaaaatggagtagatgcacaaagggagtcagtctgttcaggctgctgtaacaaaataccttaaactgggtaatttataaataatagacatgtattgctcacaattttagaggctgggaagtctaagatcaaggtggcggtaggttcagtgtctggtgagggctctctgcttcacagatggtgttttcttgcagagttctcacatggcagaagggcaagacagcttccttttcatcttaaccacctcctaaagcctcacttcttaatactatcacattggtcattaagcttcaaagtgaaatttggaggacgcattcagatcatagcaaagggtaatgaaggcatgagaagatatgagaaagaccatgaaggttttgaaaactagaaggaatggtttccaaaccccgccatgatatctgatgggacttctttgccacaagatgctgccatgttttggcagagagtgggcactctgtctgttggataaattgttgatgaaataaccctccttctttcttgggctactttgagtaggtttttgttccttatatccaaaggagcttcgattggtattatataactttctgtagctgaaataataggtttgtagctcaatcccactgtcaggcaagcattcttgattggggttaatagggatctctttattccctcaggttacgtgcaatcttttctgtttatgtcaaggtcatatgtatatgcatgtaattcaaatgataacacaaatcatttactgagcacttattttatgacagtaagtagtgtattatatgcattgtctcatttaatccccaaccactcctatgagattggacattttattctcaccatttatagattaagaagccaagtcttggtgaggacaaagaagatattcaagatcacctgataggtatcttactggaaaatccaatgattaaattgctattgatttgcttcaggctacaataggaagtatgtggtgtatcaatgaaatgatatctgtgtggatatttggatttaattttcatttctctcacagttggaaaaaacaattttcagtttctacacccactaaataaggtgtactgatatatgcctcctactatctcagtgatgagacctcttcacgagtgtacacatacagctgccaaaagacaaaaaattattcagcttagtgttttacgctttagattctaaggggtcagtaatgacataccttctgaactttgtaagaaaaaaaatccagatttgttactgcctgttgagctagcaaatggaagaaattaaagtttcaataacaccctttccttttctcaattcccttctcattaaatagtataactgtggtttaaaacaactgggagctgggtgcggtagcttacacctataatcctagcatttgggaggccaagatgggaggcttgcttaagtccaggagtttgagaccagcctgggcaacatagcgagacctcatatctacagaaaatttaaaaattagtcagatgtggtggcaggcatctgtactcccagctactggggaggctgaagcagagggattatttggacccaggagttcaagggtgcagtgagctatgatcaaacaactgcactccagcctgggcaacagagaaagatcctgactctacacaaaataataataataaaataaaacaagtagggaccaatatagggttgctaatgtattattttactaagtaactagttatttaattaaaagtaataaaatttagttactaaacacacaaataggcataatttagactaaaggatggctctttaaatgaaatgcgcttagctatataaaatatttacatcagtgtcctattttttttttcatctcactaagaactaggaaaactttgctgtgaaatgaattttgtgaactattactactggagtgttttgtattagcttgcaatgaaagagacagaaaatttgcttaatattttaaaaatgttattgtgttggatcaattttttgtgtgtacagttttcccaacttttgaactgttgaagttctcctctgaggcattgcttaaaggcaaagaaactgagaacacacagtcattgccagatattacaatccaagacatatttattcagcccaatgtcaaagacatcaaaatggacatttttagccctttatctatgcacggtttgtgcaacccttggttatctagcttaaaaatgttaatttcagtcttcaataaacaactagactcagagatattaatccctgcaattaacgtctatcccaactagccatatgcctctggatatagttggagaagaatttcagctatctaagacttatgaggtcccagctccagctgggactcaaaatcatgtttccagaacacaaagaacacttgataaagttggagagagatattttttgaaaatatgtcactaggcagcttgggagcaatttagcagcaccatcctacagggtatgaatttaacctttgctctctgaaatgaaggtcagcaaatttgtttttactctacatatcttataatcaattcaatgtctgggtaaatcagtttctaaagaagaggctgtgtttgcagataagtgatactttcaccctctaattttttaaccatttaaccctctcttctctgaattaaaattcttctcccttcacttttttttttttttttttttttttttttggcagtggaggaggaatctaaaaacttaagatgcaaaatattaaaaggggaaaaataccatactgttgtctgcagagggtaaaaagagtccagcaaaatgtcttttttttccttctaagagatgaacatgtgaaaagatactttaaaaatctgtctgttcacctgaagctttcttgcgaatccatactttaaaccagggttgacaaagaatagcccatgggcaaaatccaacccactgcctggttttgtaaataaagttttagtagaacacaatcatgcccattcatttagttattatctatggtttttggactacaacagcagagttgagtagttgcaagagaggtcatatggcccaaaaaagactgaaatgtttactatctggccctttatagaacatgtttgctgattcatgctttaaatcaaagaaagagtcttggagaaatgacatggtgaaaatacatccttagcctagatacagcaatggcttaggggtaaaggagagtagatactggttttaatccaagcattcactttgtagaaacatagaacaatatcaagctgatgaaatgaacaatagttgggaatgcactataatgaggtaaagacataataactaaatttactcctctgattctccagcagcttatctaataacaatatgctatggtagcgatgaacccagcatcctcagctaatgtcagccatttgggaataagagtttcttccctgcagcagatgtgtggctcaaagttcaccacgagtgcactcacagagagagcacagcatgtgttgttctgtgagggaccagtgctggcctgtcaatggaatagctaatttagttaaaggactggggaaatagtgggggtggcaggctagaacttgggaaaagaagagttttaaccctttctgggtatgactttacttttcaaataatgataattctgctgcctatagaatttgaaccaagagaatgaaatgcagtttatatcattccttgccagtcatcctacatggacagctgccaggaggctgatatgcagaggcgatcattgcatgcatggttatttctgtcgtagacgctcgtcatcccttgaaattgctctgctcctaagattccaaattccagcctctgcttgcttgtctcagaagtctagtacgtggactaaggagggtgggcttcctcaacttccctctccaactaaaactgccgggtattcatcctgggcctagatttttacatctctcttggaagaagggcggagactcacctcgtggcttgtgtgttgccatactttctgatttctttagaccattgctttgtcatcttcaggttattcctctctttccattttcctagcaaacatggtttggtcttacttaccataaatatgtaaaaaatcaaaaacaaaaacaaaactcttttcctcaactttgctgttctcttttgctgctttcctagtggcttaaataagtttatttcttgtacatgcaatggccacagaagattgggtggcttttctcaagaggacttatgctgtattcagtgattcagcaatcacgggtttttcatctttcagttttgttgtttctgcacagggcctcccccatgaccactgcagcagggatgaatctggcacaggcttttccctgcctcagtccagaaagaacccacttcacatttctctgaagaactaccacatactcttccacagtgcaaggacgctgggaagtaccattttccgtgtgcctggaacgggagtagaaccagatattggtgaatacagtaatgcattccacaacaacttccataaggaagtgccactacttcttcggtgtccaccactgtcttccaacccacatcttctcaaatctggtttttgccacaatcactccacgaaactacctttgtttttgccttatcttttccttacagtgatcaccttgtctatctaaccacattatctttgctacttctgccttggtttcttggcggaatttgatccaaactttatctcgtttcttcctgaattcactttttggtttgcataacagcacatgtagcatctcaagctttccctcatccttttatacagaccttctctcagtttctttcactgatttctcttcctcttcctcctactcaatgtagggagtccatgtagctcagacttttctttgcattctctatgtcctcacccttgggcttcagccttcagctctgagcatgtaactcctcagtcaatcaatcaatccatcaatccacccatccatccccttcttcagatctagaattacacctctaaatttcacttacattacacttccacttttaaatggacataaattcataaattcataaggtctaaaaataaaagatcttcttccaacctaacaatttctattaatagaactgtatctgttagaatacctgggatacatgacagaataccccaattcaagtgcctaaaataaagaaatgtattatctcaactagtgagaagttgaggtgcttctctcagctctgcctcgatgtgtgtatcagttctggcttctgttggctcctctcacagtagttagacccctctaatagctctagtggtcatatttagaggctatattcagcctccagaggaaaagtagccaactttcttgtttctgtttaagagtggcagaagctttcttggaagtctccttagcagtcttccctttgctccttaaaaaaaattactaacagcttcattgagatacagtttacatattatgtaagtcacctatttaaagtctataattcaatggccttttagtacatccacagaattgtgtggccataaccacaataaattttataacattttcattgccccaaaagaaaccctttgtccattaacaatcactccttgctcccctctctccccagtctctggcaaccattaatacactttctgtccacatggatttatctattctgaacagtttgtttaaacagactcatataatatgtggccttttgtgtctcgcttctttcatttagcatactcttttgagcttatcattgttgtactgtgaatcagtaccttattcttttttattgctgaataatattccattgtgtggatatgccacattctgcttatccatttcttggtggatgggcattggggtggtttccattcctttgcttcttttgctaagaatttctgcagctgcttatgcctaatacaatccctggaaagcatggacaaatggagccacctggatgatgtggacaaatggagccacctgcatgacttggagaaatggagttgtctgggacaaatcaagactcattcctcaggttgaagatgagtcaatcttctctgaagcagtggccacttagaagaggctgaatatttgaacaaaactggatttctgttagaaatgaggaagggagggctggtagggaatgtgggatagacaaaaacaagcaaacaaacaaacaaaaacaaaaaacaaagtaacagacctgctgcaggtaacaaccaattttttttgtagttctgaaactttgtctttttctttctcctgacccgtgatatccaactggtggccgagcttgtctatttgatctccatggtttcttctctctcgttgccctcatccacctgagtcgccccctctgcttcatgctgacattacttctcagccattcttccctaacggcctcctgctgagacccgtctttctgtcgtgccttcttccccctccaatgcatctcacacatcttggtgagtgcaatctttccacagcgtacatctactggtaataatgttacagcccctgctcaactctactgcctataaaactaagtccaaattcattactcacacaaataaggtcagtctcagcatctctttatttatctgtcttagccacaaatctcttcctttacttatatagctccaacctattatttgagacatcttagataataatagccaacatttattgagatgttgtgtgtcagtgctgttctaatactcatgggattatcccattggttcctcccaagaagtctatgggattgatacaattattagtaccaattaataattcatacaattgttagttaaatatgaggaaatcaaggctaaatatgttgtctatgatgatatagccagtaggtagtcaggccaggatttacttccaggcagtttgattcttatgtggaaacatctccttcctgaatcctttcctgattccatatccctttccttcattacctcctctaacctctcaacccaccctcaattactgcaatttctccctcctttttaatcatatagcattttctttatagggctgagcttcatccccttcaaattcatatgttaaagtcctggccctcagtacctcagaatgtgactgtatttggagacaaggctttaaagaggcaattaaggttaaatgaggtcattaggttaagcctctaattcaatataactggtctccttataaaaagaggagattaggatacagatgtgcacgcacagaggaaaaacccacgtgaggactcactgagaaggtggccgtctgcaagcccaggagagaggcctcagaagaaacaccctgctgacatcttcatcttggaattctagcatccagaacagtgagcaaatacatttctgttgtttatgccaccagtgtgtgtgtggtatttggttatggcagtccttggaaacgtatacactttctggacctcagtcacctcatctgtaaaatgggttgctggaggatttagtggaataaatttctcagcacagtgccaggcactttcttgtacagcaaccagccaacagccatttctcccttcctgtcatcctaaggtgacctttggggacagaagtgtcagggctggtaggggcgtaaggctgaaacccctgaccactggcaaataagcaagttaagatgagcccaaagagtaccagtagctacaaatagagacagattccaagatcaagcactaggcagacagaagtgaactaggagacagggagacatgttgtatctgtatccacaagtaacagaaagcctgtctcaaacagaattaaacaacaaaaaaaattggatgtatttgggcctgccagtgaatagttcagggatgggtacagaaactcaaaagatgtcacaggatttctgtgtgtgtgtgtgtgtgtgtgtgtgtgtctgtctcagatggctgagttccttctattccagttcttcaaaagattccatgtttgtggttgtgagatgtctgtggtggttctaagacttcacttgcttgcagtttcaaagtttaggaggggaaagttcatccttcttttaatcatccaggcaaggcctgggactagatttccttgcttttgtttagctcctcttgagtcgggtgcccaatgctacactcacctcttggcaggggcaggggatctgatgagctggtggcttaggcctgtgtcacatgggccacgactgcatctgaaccaccctccaaagaaggtctgagggaaggggaccagaacaatgaccagaagaatggtgatgagatccagacacatggccactacacccacacccacatagaaaaagaggtgattttcaacaataaagccaaggagttctctttttctctctccatctctctctccttctcccttttctacatctttttctttttttagagacaggatatcgctatgcttcccaggctgaactccaactcttgggctcaagggatcctcccactttagcctcccaagtagctaggactacaggcatggcaccgtgcccagcttcttacttccacttcttaaagtagacttctgactcctaacacatttttgttgtgacctagtttaagttcattttgtcatccgatcattggctttaaggtggccagtctgccagcctgctgcaagactgaatggggcagggcccctagtgacagcagtggagccatctttcaaccaagccatcctttcctgtctacaagtgcttgacagccttctagagtctcttgcctgcatttctaagtctcaggctcaagtagactcaattccaggtggcacttgtaatgtgtgacataccaaagacaatagtagtaataatggttactattaaaggagtacctactatgggtcaggcactgtgacaagtatgtacatgttccaatcctgtgttactctcaactcacccgtgagcatcctcattttactgatgcagaaacggaggcccagagaggttaagcaacctgcctgatgtttcgcaggaggaagtggaagaactggagttccaaatcaggtctgcctgcgtctaaaccccttactctttatcactcagccccaccacaccgcctccacagttggcaggccggactggactgcagtctgcaagcaattagcgaaagcagctctccagcaaatccaagaaacaatccaatctgtaaaaggggagggggaagccatcttaaaagagaaagcttttttcctccccagctggttaagggggagcagtttgccacaggctgctgagggcaaggaaggggcagaatgttcactgaatgttcattctcccaattgtttttctatgacattgagctcacactccagggaaaatgcagggcctgagttgaaatgtcgtccaaagccattcagctagggctttaaaaggagcttttgttggtggaaatctctttactgacctgactttccctgggcttgggtttgcctgacaaaataaaagatgaccagttaaatttgaatttcagataaacaacgcgtaatcatctgggataagtacgtcccatgcaatatatgggatatacctatcctagaagattatgcgttatttatctgaaattcaaattcaaatgggtgtcctgtatttttacttgctaaatctagaaactttgtcagttttggacttcaagagtaagcctgttccctctgtcttgctgcccaaccagaatccaacaggttattttattcctgtgaaggaagcagaatttaaggatgcattctggaagatgcatgcttatgcatgctctatctttccatcttgctttttaaagaaaatgttacaaaaatgatgtgggctttgtaaataataacaaagataataataatcctttcaggatctgggaaatgtcttgagggtttgggggaatcaactttccactgaagttcctggaaaccggtcagtacaatttgtatttaataaagagcagccaacagtgctgccacagcatcttgtgagcgcatcccacagaggaagtgggcgatggccctgacccccctgcagcagaggcccctccctaaggattagccgtgaattccaagctctgcaggaccaagtgacaatgggagattgggagcagggagggagaaggaagggaccagacggaaaagaggaagagagagagaggaggctttagtgcaaattcaacatcatttccctcatcgcaatgctccctgcttccctctcatttataagtctggagcacattcttggcattgagactctcatgcttggacccttctcttctcttggttcctggcacggtgaatttggccatttgctgcagtgatgggccattccagggagtgccccatctaaccagcagcaggccagctgtccaaggagccttttcaaaagggaagacaccctgggagggcaagtatttgccaagtaactaagtgtccccttgtttccaggtgcttagtgtatgtttgtgggtgcgcacagcagtgaatacaaggacctattgtgtcctgtactctaaagctggctgagggcctggtagccagggtgggtcacgattcactgcaactcaacacatttttattgagctcctaggttcaacaccctgtgctcagcctgtaggaaatgtaaagataaggtccgtcctgagtttcaagagtcttaaattctaataggggataaggcaaagagacagtaacaaagcaggcagaacaaagtcggtattgtcagaggggtaaaagtcaaagcttttaagatgctcaagacagcaagaaaatatatctgcttttagaagagaccaggaaggacttcatggaggaggtggtgttcaagatgagtcttgcagataagtgagatttcattagggtgggtatggaggggtggatatatttggcaattggtgttttattgtgtttcatgtagaaatccctaacatgggccgggcgcggtggctcaagcctgtaatcccagcactttgggaggccgaggcgggtggatcacaaggtcaggagatcgagaccatcctggctaacacggtgaaaccccgtctctactaaaaatacaaaaaaattagccgggcgtcggggtggtggcgggtgcctgtagtcccagctactagggaggctgaggcaagagaatggcgtgaacgcgggaggtggagcttgcagtgagccgagattgcgccactgcactccagcctgggtgatagagcgagactctatctcaaaaaaaaaaaaaaaaaaaaaaaagaaagaaatccctaacatggatccaaaatgaattctgctagtgataaatatggtcatatgctagtatccaaagcaaacaagcacgactgattttattacaaagtttttccttgaggagtatctaggtgatatcaacgactcacatggacagctgaaacaaaacaccaagctcatgtgccagacattgtgttgtgtgatttacatgtaatatattactcaatatgaatgaatggcatttttctggataatattatcatatcaacttcaagattaagaatgtggtcaagtcaatttatacaaccccacttcatccacccctccacctagattcaaaaattcttccattggtattacaaagtctactttttgttccccttcagattgttttcattgatatgccatttttgtcattgtatgtattcagtaaaaatgactaatatggacaaatatatagacaattacttttttctctttatttttcatatatatatatagacagagagagatagagaggttttttgttgttattgctgttgttttgtttttttgtttttttttgagacagggtcttgttctgttgcctaggctggagtgcagtggtgctatcgctgcttactctagcctcaagctcctaggctgaagtgatcctcccacctcagcctcccttaattaacatttacttaaataagaaattatgtgaaaattttgcttgactctgatcaatatccatttatttctttgtgatctttaagtgtagtatttatggaatgattgctactgaacccctgcactatgttaaatactgcttaagatatggcaaggtttctaaaatattctgaagaaaccatggtataacattgaaaatagttggattttgcttaattgtgtcaaagttctggagaagaaaaagccctggcttctttaagaaagaggtggaggctttggcagcctgtaaaaactgttggcacacttcttgtcatagaaaccactttccaagtcaaggaagtcttgataaaggaggaggaggtagagttctgagctggctctatggggcctaagaaaccatttcctgatttagaaaaaaggtcacagggaaacactattttataagccttgatggtttagctttctttttagctaatcctctagggatgaaaagaggttcttcaacctacaagaaaagaaaggctacccttgatagtagccctccagatataatgaggagggtggtaccaaggtaaatggttgctcaacacaagtgctagtcagagaggtggcagtgcaagtcagggctctaccaagatctcagacaattcatttagtctattcacacttcagtttcttcatacattaaatgtgcatcatgccgttatttcatagagctgttataatcattcatttattgaacaaataggtattgaacgcttaccatgtgccaggcctgtgcagataaagcagacagcccctgctttgatggaatgatgaaatgagatgatgcctgcagagtctactgcaaggagtcaataaatgctgtgatggaagctattctcccagtagtgataagtacaagcatcgagaaagggctatcttccaggctttttttgttgttcattggaagcactgctaagtacagggctacttcgaagttctaaaattcaggtagactactggagtgtgtttttcttacactccagtgtaagaaaaccctgctaagatcaagttggataaagttgccatttatgataaagtcagatcaagttggataaagttgccatttatgataacaaagtcttatgaaggaaacgtcttcaaattatatttctagggttggtttttttttcttttaaatttcctatactggcatatttgttacgtgaacatgtcagtagttaacaagtggtcaaattttatatgtagacactttgagtccctccctccctccctccctcccttccttccttccctccctttcttcttctttttctttcatccttttccttcctccctccctcccttccctcttccccttccttccttcaatacaaaagcatcataagttagatcttgtctgaaaagcctgattcattcatctacaaaggaattgccataatcaaggtgcctctgtctactacagaaatggatgtcatgagcctattagacattaacaaatgtctctggcaagcaacagaaaatgctatagcagtgttgtaatatttgcggtgataatatttatatacttccaatcttattttattttataaaatatattattccctcttaaatactgatgtccaaagctaacttgagaccacagaaaagactttctaagacatttcttctaagcatgggcttataagaaagtagcagagaatgatgctttttgtgtactgcaagcttggctgctatatggcacaaataaggctgtatttctattacctatcaatgaacaaatctatcaaccaatgaacaattatttagtatctgctttgtgcaagaaccatgttggatcccaagggagttaccaaaaaaagtaattaaataataaaacagaattctgccctctgaggaccatgtagttgaagcggtaacaaaaggttaattaacaattaaaagtcaagtgacagttgttccccccaaaatcataaaggggagagttttgggaaggttttgtaaggaaagtactctttcaaagacaggcagggtttattttaggtaactcattttctaaaacatgtctaaaggcaaactagggaaaaatgtcttcctaggaacttgagctgccatgtggtacaaaccagactgtatttctcatatttatcagccaacagattcaacagtcaacaagcattccttgaatatctgctttgtacaagaaccaatgctggatttttaaaatttgtttttttaattttggaacttaatgaattttagaacatatgtgttgaatatttgaggacagatttgcaacctctgtaatgttctaggagaagttgagcccaatttccttgagccagcagcctccccagcttcccagagcctcggaggctatgcttttggcattccccatagcatagatgaaacaaacacaccatttgaaagcccaaagtgtaagaatgattacattctgctgagcccttctctgatcacaggaattttgcatctgagtaaacagggagttgaggctggaggctgatggatgtgaggggctacttccttaaactttaaagcaagcacggttccttttatcagacagtggaattactttggtttagaaggaactcatgcacaataacctggtaactctcaaagtgaaaatagggacttgctccttgttcatttccaggctcatgggagctgaaccatgaattaagagtttggctcattaggaaggacagacgattgggcacgctgtggagccaacatgttttatgaggctgggagtaggttacacaaagtggcacagactaagaaaggaagatatttggaaatattttttctgcttaaagctctgagattgcagagggttttcttagctctgtggaatttctttaactgccttgggatttctaggtttctaagaagcttgaggtggctgttaacctaatacacagttgaaggaagccaagacagcctccctatgccagccatgtggtaggatgtcttcttaaaagactctttgaaatcaaacatgtaaggaaatccttcttttctgaactagagcctctgaaactgggtcaatagctctcatccttgtctcctgcttgctttgctgaagcacagtgtaagcaaataaatatcaacgaattgcttaatgattttcataaggctccatcctttcaaggcaaggggctctcctgaaatgtttgatctgctctgtatgaatctgttttccaaatggccagcacatgtcgaggcctgctgtcctctgggttacaggaagatgcctttgatgggttaaccgcagagtaactgaactcttttcaagtccctttccaaagttcctttgtcctgctgtggatcttgccacttggattggatcagcaggagactgctcctggcagcaggttctagaacattctccctctgatttgagcttggtcactggttaatgccatctgaaatatggcattccaaaggttgaaaggcaagcaccaggcagtgatgaaatagttacccaaactctagatgagccactcagacttttccagcattctgcacccaatttgtgcctgaatgaatttccttaaagccagatgaagttatcatcattttcaactgtcttgttattagcaaaacatctcagcagctgcccgatgctgctttcagttggatattaccactttggtagtggccttccacattctgtagtgtcctttctttcccaggctgggtggaaatgtttaaccaataactttctcaatatcttgcacatacataataaaatggtaatttggtttggtttatttctacagattttgatacacattcaagttacagcataatggctgggacttacatggttatcatcaagttgagggcaaactggagaaagttttcccttctccaacaagaggaagaagaaaagggcaattctggtagctgctagctggtgggtccagtgccttgggcacagaggaattattgaggaccaaaatattatattttgttattttctacaaaatttaaccttttgtgaagaaatcttaatgataacccaaaaatgtaataactatttataaaaacataatgaaagatataatagagcaagatgtaaggaaatggagacatctttccttcttcgctctgttttcaaagttaaaatacttttatcaataacattgccattattaggcaatacttaactctacattttctatatacttacaaggtaaccatgttttttcttaccttctgtgattctggctatccaaaaccctcatctccttatctatccgtatactgagtaaactgctggcagctttgggctagtgcaacaaatctatatcaagtagtgactctgcctggcgcagtactagcttgggctttaaaagcccataatactttttttatttttcctcttgatattaattgaaatcaggtgatggcaaaaagtcctttttttaaaaaaaaaaaaatttaggctactggcactaaattctcttaaatagtcatttccttctcatacaagaaatacttgctaatttcagaccaatcttcaaactgtattttctattttggttaattgaattaccatccacccagccacctcgtctagaaagctgagagtcataatagactcttttctcttcattacaaccttcctcccacatccaatcaatcaccagcttctatcaatcttccctcttaattattactgaaatccgccctctcctctgtctctggcatcagagcttttctccagcctttgacatcttgaatctcctatctagatttgccaccatgacctcctcctaatcattcccttagcctctactctctttcctcttctaatttattcttctccattttcatacaaagcttatctttatccaaattaaaatttaataactaatatatcatggagctatgatttaaaccagttggcaaagattttttttttcaaaaaatcatgactaggtgtaaaattttactgaatgtttttcattatttatcatcatatgtctataataaattatataattgattttcttatgttaaattcttacatgaaatgtaagaattattttctatgatatttatatatatattccatctggattgcttgctagcatttatttagtactttggcatgtctgtttgtatgtgaggttgattctcattttgtacttttccgggtttgacatcagggttataatagctttataaaatatttgtaaaatatttttcttctggaatggttatttgttaggggttattatttctccctttaatttttcaaaaaaaaaaaaagtccgcaaagttttctggagctagtcttcttttgtggaatatttttgactattgaattaattttttcctcgctggttataggtttatttaatgtcaatttcttctcaacttaatttccataatttatgctttctaaaaattgtacaatgtatctaaagttttaaatatattggcctaaagttgttcatgtgattctcttatgatttttaaatatttactttttgtttcaatgtcccttttcatgtctagtactgtttatttctgcctcttaaaaaaatcagtcatgccaggagttcatctacttactttttttgaaacaaccagcttttcattttgttgatcagatgatcagccattcattcttgacaccaccacaagagtaattttttggaaactcaaatccagttttaaaaacctatcagtggctctccacaccatattcaagctcccacctcctaacagattcactagttcatttctccacacttagtccttcctgttctcccctccggcaatatcagattccttctaggccccaaaatgtcagcccatttcatgctctgtgcatttatacagacttttttgttgttctgttttctatttggtcaaaatctttaaattccacctcaagttttcctcttttctctctctgtctctctgtctctgtaattacttccttctctgctttgtttttgtgccttacccatattcctatgttttcctctatcatcatgttttatgtgtctgcctgcctcctggaccaggagacccttgatggaaggtgcaatctatttttcatctctgtattcctagaacttttaacttatttctcttatccccatatctttccttttttaaactggaaaggcaaaaaatagagaagagattacccaatgtccctttcctctattttaagaaaggttggcatccaacccctccaactaagatgctgactaaacttactttcctcttcctcccttgtcaatatgcacttagcattgaatcacctatttgctaacatcttcaatctttcaattttaggccaatattttcttcttatagggtccaaagtagtttatgttcagacatttcaatgcattaaaaataccacagtagaatttaatcaggttgcataatgttttcctcatagcatttatttataaacttatgcactatttaagtagaagggaagataaaattttatgaccaattcaactacattttaaaaccttcatatttgggcaaaatattctaagtaggtaattcaaaaaaaaatctctgttttttttctcatagtttgtctcatctaggaacttaaactttacaacaaccaacctcgatatgaattacacaggacaagatgctgtttaaaagaagcagctaaagggctgtaaaaaccataagggaggctgggcacggtggcttatgcctgtaatctcagcactttgggaggctgaggcaggcggatgacctgaggtcaggagtttgagaccagcctcaacatggagaaaccctgtctctactaaaaatacaaaattagccaggcgtggtggtgcatgcctgtaatcccagctacttgggaggctgaggcaggagaattgcttgaacctgggaggtggaggttgcggtgagccaagatcatgccattgcactccagcctgggcaacaagagcgaaactctgtcaaaacaaacaaacaaacaaacaaacaaacaaacccataagggagtgaggaaacctgggtttggataccagctccacagttagacttcaagcggaacattgatcagtttaagtctcatcagtaaaacagtgataataatatctgactctctagatccttgtgaggattaaatcatataatgtgtgggaaaatgcctcgcacagtgccaggaacataagggatactcactaaattttaagttaacttgcatgctaggaaatcacaaatatgcctactttgcagatgataaattcaaatttacaagattattactgaggcattcaatgtcagcttaattaaagaaaatcccattttccctgaagctctgctggctttctgaactttttgtcctggaacaatactctgtgctaacccattttattttcattggtttagtcaaaggacaatgagtcagacactgcagtttgggagtcttgagttccattttgagcatgcatagtccagtgaccttggacaatcaatgggacatttttttgtgaaccctttttgcatttccccaaaggcaaagccttagtcctattcctcctttctgtctgctcagcacaaacttggcaacattcgttaccaaaaatcagggcatcgatattttaattcacaagaaaaatccaattcatgtaatatctttatccctctatgaactgcggggaaaaacggaagtaagcaagcccaaatgttcagcctaaagcatttgccgatattcctttaaagtaataatctccctgcaaggccagcagctctttaacggacacttcactttgctgttggaaagaaaaccttttctgtgttctctgcctccacctgaactactcagtaactgaaagtcattttgtttctcctatcacccttggcagctatgtacacattacccatccatttcactatctaaatcaggagttgaggaaaagtccctgtgggaagcctgaatagccagcagctgcgtttggcctggccagctgaacttcagcctgcatcttggcccaaccccaggactgataacgcctttgctaagctttagatttccccagcatttgcgtgcaaaatggaaaggctggtttcctctgtcctgatggcttctctcaatgctcttcgggcttgttaacttgttttaggcaagaagagagtgggggtgggggttcctgggcccaatccggggtctgcatgcttccagcctgccccaagttgtacagcaaatgctgacctatattccagtgacacacaccagatatgagtaggacataactgcccagggcgctgcccactccctcctcctccttgttcctcagccaggagggcagccagatccgtacaccatgttctgtcttgtcagccgatggtgtgacaggcaccggggggcttattaggaggcaacgcccccccataatatgaacctctgggccacaccacactgtattctctccaggaagagtagcagtaaccgaaagggtgcagacaagttgatctcttgagttagatcacaatgatttccttccagccattgtttttggactgctttgctgtgtttctttagagtgggcagatggcaggatcctggaggtgtaaaacagctacaaaaaacaagatgattcaaacagaaggaatatgtataaaccctgctgtatcatctcgatattaatcaagagacttggcttttccttccccctttgcaggatgtttaaggttttcatgcttttttttttttctttctttctttttaaaagaaggacacactgtgtaaatgggccacttttggggttttggctgaaaagttggtgtcatttttgcattcagtttattttgaggacaagcccaactgagagactttacagcaagaccacttactttgagtaaatggaagaaagtaaaaatggaacctccatagaaaaaaagctaatgctgggtagcaaggatggtgccatccaaagtacaggaaccgagcctaaaagagacaatttcaagttgagttgtggtttgccacagtgtcctcgtgatcagttgagtggtcagatgtcaggggtgactgaaaataagttcattttcccacagggtaaagggagagaagaaaaaaaggggaaaaaaaggaaaagctttgcccatatgaaacaaatactttaaaatttcagagtttatctggcatcagctcgaagatttaccatcatccatgtgacttttgtgaagagcactgaagaagaaataacagttgttgcttttgattagcataacattttacccccctcccttttctccctaatgatcacaaatagtcctttatggtgtgattgcccagcaccattgttcgttcaaaagatctgagagcaagggtcttgggcttacgttattaaggcgctggcagggagaggagagctaggcagaatgatctcaggcaaagagctgcagtctcagaatcagaacactaacagaaccccggaccttcctaattcaacctgaggtacagcttggctttatgatggcagccgcagaaacgtcttttcatgctgcatgtgtgcaggaggactctgagattcaaagagttaaagtatcatctgcaatgggaaaaaaatggcttaaccacaaattcaccctgtgctgggctagttgtgtgttattgcatatatgtgattttcttttctttttcttttcatttttttttcttttcaaatactattctatttcatgatctcatatcctaaaatgtctcctttctaatttagtgagagggacttctggttcaccacctggaacagggtgctttcttctatcatatatgccagaaaagcattaaaatctcaaaggtgaaaacccagagcatcaaatcacccattgcaaaaccgaaggcttgattcctgatttggaaatcacgtaacaggcaacctcgaatcccaccatcctgatgctttttctttctgtttatctttttgttcatgcatcccaacctaatttcctgatttcactgagcctgtagcaccttgagcaattcagtggctataaaatctcctgccgactttgttttggctagaattgcaacccacatgtgggagaattaagctaaaacatcacagagctaatagcgtgcctctgtgcagtggcaggcagatcagtagaaaaaggtgacatcatggatattccgggacttcaggtctgcagtgcaaagcggcttcctcactacacatcagagtcagaacctggatttgagacaaaaacaactctcccttctcataaatatctgctctggggctcaaaaatattctaagtgcaacagctcagaactagtccctttcccttggagactcatctgactttccaaatccaatcacaaactttttaatggcatgtcatgaacctctcagctcattatttctcttcaaagccctccagtttgccagcttagagcctgtgaagtgttgtttgatgatgtgctgcaccataaataagcacataggacatgctaaaatccatccttcactacttctggctttcccaccaggaatactgccatataatcagggatgtgtgatttgcagcagttgttctgaactgagagttttgttgttttttttttaatgcgtccagtgtgtaatgtaggtaatataacagatttatcatgtttatataaatcccgcttttttttccttcccgttcctttccctttcctcccactctctctcacggctagaattttggaagcaaagaaagtaggtgtagagacagaccttctaaaatagccatcacagctttaaccattccttactgcaagaaatcaacgcattggataatttcccaagtctcttaacacccagcgttccctctgatgtctaagttgtgagcagacaaccattttacatgtgtaaccagccatgaaggttagcatacagaatggaggttactgttgtaatcaaataaagctcacacaggctaatctgacatgtgttttgactattttttctagccgtatggtaattaggccaaaatggaaagcagttgacccaaatagctgtcacttgtattgttttgttatgaatcacggtgagattaaggaaggatgtgtgcaaagatcctgaggtgggaaaaaatcttggtgacttcaacaagctgaaagaaggtgagaatggccagagtcggggagaaagtggaggagagatgaagctggaggagggcagagcctggcttggagggccctgataaagacagggcattttattctgagaaagggcagaaatgcacacaaatgatcaaacaaaatcacaatacatgcaacagagggggctggcctcatttgtagaatcagagaggaccccaaggaagtgacatatacttaggagtttgccagataagaagaaggcagtcagatgaagaagggggaagtgagggttgagcagagggaacaacatatataaaggccttaaggtcagaaaaaatagaatgagttcggagaattgactagcagagctggacaggcctggcattgagtgcccagtctgccatttactgtgtgaccttgggccagctattctctctgagtctcagtcgcctcgtctgtaaaacaggaacaataacaatgcctacctcaaggggttgtggtaaggattaagtgaagtacattaaaaagtggcaaataataagtgcttgtggtagatagactaatagcctcccaaagattcctatatcctaatccctggaacctgagagcctgttatgctacctggcaagcaggttgcatgtggaattaagtttgcagatctgctgactttaagattaacctgatcacctgggtaggcccaatataatcacaaggatcctttaaatgttgaagagagaggcagaagagtcagtttcagagtgatgagatatgagaaagacttaacctgccattgctagctttggacatgaaaagggggcactaggcaaagaatgcaggcagcctctagttgctggaaaaggcaagacaatggattctcacctagagcctccagaaagaaacacagccctactgacaccttgatgtgagctcagagatgttgtggatttctgacctctgcaactgtaagatgatacgtacatgttgacttaagccaccaagtttttaataattttttacagcagctgtaggaaactattacagtacttaataaaatgttagctggtaatttaaatttttcccttattaagtgatgtcccttttgtgatgagcaagttcagaaagatctatatcacacttacgtatctagagtcttcgtctggattcattttcactttaccatctacctactgttctcaaaataaatgttatacatagtggcaaagagcacaaattcttacttattgtagtactgactgactgcaaacaacagaaatggactctaacttaatcaggaaaggcatttgttgtcaaagtattagatagttcacagaattaactggaagcctggaggatcagattcagaaaattagcaagagtccagaaagatcacacagcaggtaagagggccaagatcaagacaaggagggttcagaggctgcccctggacactcatttccagtggtgctggactcccaatgccatcactgatgctatggataatttttcaacgctcaatctttgtattattcaatattccaagttctgggcaaaaatgtccaattgggatcatttagctctgacagaggtggggtcagcccctttggtttccatattgattgatagtaccctccctcccaccaagatgtttacagcagatgatttccccaagcatgaagctattgtggcccaggtaactcccaacatgacaaatgaccaccacaattaacctcttgcaactgcagttttcttgtccgtacagtggggataagaatctctactacattccaattgtggagagttaattgaagtttcctgaacatgctgtccatgtgccttctgctgttccttctgtctggaatgatatctctccttatctgtctagtgaccctctactcattcttcaagactagtgtgccaatcctgggcctggtcccctctgatccatttcctgccttcccttcgtctgctctgtattgcaagcaaatgacccttggaggctgtgttttgtaggcttctggatgggttatgccaatggaaggcaatagcagaagatattagggctgaaagagaaagaaacaattatttctcttttccttggatggtatcttaagccccagctgtttctcccatttttaactcttttggaaaagccatgttctaacttctgccaggtaaccctaaaccctgagcctcatcaataccaaatcctctgtttctctggcctaggggtggtagaactgcattacctgccgttgctaatctatgggatgcctaatctatggaatgtcttgtttggtttcttagcaattccataacctgtaattctgattactattgctgtgtaacaaattaccccaaaactcagtggcttaaaacaaccactccatgggtcatgaatctagacagggtatagccaagatggtttatctcttggcctcaatatctgggacctcaggtgtgaagactcaaagactcagatgactccacacctgggggctggaatcatctgaattttatttgctcacatgtctggtgcctgggctgggatgactcaaagactaagactgctggctagagcatccacacacagcttgacacgtggcttgattccttacagtgtgacagcctcagagtggtcagtctgctttcatggtggttcagggccccaaatgtgtgtgtgccattcagcaaacaagctgaagctctcttttatgtactagcttctgaagtcattcagcatcacttcccactattctgtaagttgcgatagtcccaagtccactcagattcaaatgggtggtggaaacacaaatcatgcctgtgaatggaaggagtgtcaaaatttctggggtcatgttttaaaaccatcatccctgggttaccaatccatggcatgaaactgcccattttactaacttggagtgttttctgtttttccagttgaaccctaaacattcagttcagctgttgtttgcgctattaaagttccttaaattccccaattagagctggtctttgttgtccccacctttgtgctaccgtgactcatcatagcatttggataaactgtgttctaatcactttgtttctctccctcaatagactataggcttctgtagggactgagccttatttatctcagtttcctccattattagcacatgtctagaacacagcagacaataatatacattgagcaaatgaatgcatatttcactctaatcctattgatcatcaagaatcattttgcacttaacaccctgagaaaattctttggaagtctccatgtggctttataaagattttgacccctgatatgaagcaaaggctatgaactcaaatgccaacagggcctggcaggtaaatgaatgaaatgaatgaagcagacaggtatagagaagagggtgtgaggtggactgtggggagcatttaccatgtctaccaaggccaccctgtgcacagccctcaacaattcagaccatcagtgagtgagaatgtggctcagtattccaagaacttctgatattttttagaagtcagagtctctatttttatttcctgatttttaagtgttgcaaattaactaaaaaattttaaaaactttgtgtggaccaacactctgcaagccaaaccaaatataaccaaaggccggattccgccctcattcatgtcctctgatttagaattgcctggcaaggatccacagataacttcattaactcaaacttcaatagcttgagatgtcatcctagaaatataattcgtgaaagaggcatgtaaatttgttaactggctagactctttaacattgtgtatttaacataacaaaatacacaataatcgaatgaaataatatggcaaactgcacttgaaactgttaaatgtgtttcatgctacccaccttgattgttttaaaagctacaaacctaaaattcataataattttatcttttgggatcaaaatattttctccacattttgccactgaataaaatgcttgcatattcagagggaatacagagataatgatgaagaaatgagatcactcctccatgactgctcagcccctaataaagatgacgggcagaatgatgcctctaacttaaaaaatcttaaatgtaaattccagcatataaaagaagagcactgcactagaagtccagataactgccttctagtacttgggtttgccagcatcctgcacacaatgcctggcaccaggaaggtgctcagtaagatgtgcatgaatgtgtacataaaatttatatgtgagagaatgagcagcatgtgactttgaacaatttacctaaatgacttatttctttatctgtaaaatgaggaatttgaaagagctcttttatcattgattaatgcacccagcacatgctaagcatactaataaacaggttctcatttaatctctatggccccacagctctaaatttctataaaaacgggcttccaaagagcatggaatggattgggtagctgttataaggagtttgttggcatctcttctctttagttttgcaccaggtaaaaatggacaaaagtctgcaattcaccaaaagtcacacatggccaacactaccacgtgcatacacacacgtatctgtggaaacacacaaagctggaatgacacattttagtatttaataccttcttgtgacttaactatgtgcattagagaagatgttcatggaactgaaacctctgagacccctttgaagattcctttgccccacatttcacctatgctttgttgaatctgaggcccaggtccaggagacatctaaatgggtcagctaagcttttccctggcctacaaagcctcttccaatggtgcaccacaccacagtgtatttatcccacatttggagcatgtcagagacaacagaccagaaagccttatgatgctctgctgatatttcttctcgttccaagtagccattcctacttggtctgggaagagataaagttgctggtccacagataaaaatcagcaggtacactagcaaactgctggtgggtcacctaacctgctctggacctttttccttccttctttactccaccccaggacgcttttccatctctcttgtctcttctccctctatctcgtcatatccaatttatgtgccatcccccacaacccggtgcacagtaggtactgtatgcatttgataaactatttagattgacctcacttgttctgacaaaaaacgctggtggttctctaagccgtcaatcagaaagtcagattttataacaagttgtggaagagggaaagcctttattttcatttttaggtgtccaatcccttacccccatacaactcccacacagacaagtacactgtgcagttttcatgaactcagatcatggccagacctcacgaggtgggtgggcagaggctgtggccagaggggctaggggcttcgattttcttcctcatctttacctgcccaagtctataactttctttaggactctgcagtactatcctctgctgcagaaaacattctctgtgtgactcctggagatccggttaagtttctctcatgggtgctaatcaccctgtccttggtcctgtgaacatcaatcagccagcactgtcatttcccttactggactggaggtaccttgagcagggctgaagcttattcacattctatacacagctcctatcacactaccgggcacatagtaggtgcccaattaattgactaccttagtgaatgtatggctatttaatacatgtattgtagagataactttctaagtctgtactctataggacatagaggcctgggctctggataaacactgctgagttgcacaagttggtgatattaaggttttcaattaaggcaatagtcatgggagcagaagggaatgggctctgacaccagaactcaggcttttgggccttgaacactcactcaaagcccttaggctgaagtgaatttttctggagcttgctaagataaaagcagtgtttaagggaacatttgggcatgtctcagggcagtgaacttgagcaatttcaaaaacactgggtctactttgtagagcgggttgtggatgtgatttacccactgtatttcagagcctcggtcactgtccaggcaagagtctcaggggtctgtctctggggtaggagttaagctctcacaatgctcacaaagttgcttcataagtctttggttttaacatgacagtgaccacctgtcctacccaatccctgagggaaacattagaagcagcagcacattgacattcaggctggaagatgcagtgtgccaaagattaaatggaaagacttttcctgggttattcttattgcatccaggggtggcaactggggacaggggtgccagatggacacagaggctgctggggtgggtgtgggattatttgtttctatagaaacatttctataggacgtctgtagggcctttggaaggtggcactggtcttgccctgagaaccatgtggtgccctttcacaatgttcccaatgcctttttattaccaaaggagttttctagtagctgccctgtctctggcctggaatttactgagattctgtgaaaatggagtcttctgaattccaagccaggtttctgcctttccaggaagacagggtcttagtatccacacactgtgaagaacgagaagcttggccccagagcccttggcattttcctgcccccctccctcccctcctcctggcctgggtttgtccccctggggcgtggacctcagccagttgtcaactaatccttgctaaggtgttaggtggcaaaggctcaagggttattaatctttgtaggagctttccacattaaacaaagttttgttattaaatcaaagggcattaaaaattcaccaccatagcataaaaacaatttctttgtgtcctctataaatccttacctttaaaagtgagtttagttatgatcataatatatatgcaatatgtgggactttttcataaagaagaacattttgcacatcttcacattttttaatgtcccattctcactctcatagtagtttgaaggcagcttttgcagcatctgtccatttcttgatttctccccagcatatccagctgccctccctctcttcctgcctcctggcaatgaagcgagcccccagggccatggtgtaactgtgaccctgcctctacctatgactaactcctgccacactgaataaacaggagtagcactagatgcaagatgagtcagagtctttctccccaaactatgaaattaaggccaggaaaaggacttgtgttggtttctttttgggtagctgaacctgcaacatgtcagcttaggagtggagaagtgggttttctccaacaatgctgtggacctaacaagagaagaagctgagagaggagaatgaagcagatgtgcagagaagggcagaggtgacagaacttccctgaggcccaggtatattcctgctcttgatttctgtgagacacacctgtattttttgcttaagccagctttgtttcatttttgtcacttgcaagcaagagtccaaactaattataagaataataatattaatgacatggaacatttgtgatgtatcagatatttacacaccgggtatttaataccttcaatcacctaacgagctaacatagagatccagtaaccttctcaagatagtacctcttaatgaattgtggactgggatttgaaccctgatcttgtctgattttacagtctatggtcttaactattccctatgtggactctcaaggtaagtgtgtcatcacagaagtgggatgaatagagggaagaaacatcatgccttccgagaataaatataaaacactctcatttcagatgccagaaataagacattttgaggcacaagcctcttcctgcttaacccccgtcaagtgaccccatatagacagtactgttttccttgtgtcttggcttatggatgtccttgcctggtgtttggtacctcggatgggcctaccctttctccaacagcaaggaagacctgtgttgagtcagttctctgcatacaaacatgtctgcatgatccagccgtggtttattcatgatacatttgtaagaattctcctcttgccatcaactgtgctcctggaaccacctttcattgcttctagttggtatattcttaaacatttcaaactagtggcagtcactcatgcatttattcactatctttaacatgttagttgaccacagtctatgggcctgtcttaatcccgggaatacaggacaaatcaaacagcatgtctgcctccttagagatcacagaggcatttgaagacattccctaataacaccacacattaacatcagagtagaggcacacacaggctgccttgggagcaagggaggaggagtaggggtagaggggtgatatggggtgtgtaaactaactctatctgtggaaaaggcttaatgaacaactagacgttggaggctgtgagcatttgtactaacccaatcaacctaagtaaagcaaatgcacaagttttcgtctgctgtgatattacgataaatcatttatcaggaacaaaggctgaattgcagggctatgtctctccatgtctgtcttcaagggcaccatgattttgggaattgatagaattggttacaaaccttcatgtgtactaagaattcctagccaatcatccagggatttgcttcagcagagagtttttgcgtggaaggactggtctcacagtttccccctagggcagcacatctcttcagaaatgccaacccagtggagggaaagcagccctgtgaggattctcacatgcccctggacatcttcaaaggtggcaaacaggaatcaagaattacgcagaactcatcttcctctaggatgggtacactggagcacagttgtagctggagtagaaaggcagctcagggaggagaataagtttcagggaattcagacaaaaccagcccgtggggaatatttttaaattccaggcaaatgattggataggaatacaataagcgttcctagtgtaaaggctttcccttctcgatattgatcttgtggcaactcagaaagctatttgcaaggaaatggtcactctttccctttacataacattcataaatgtgcagccaaattcaatgtgtcatagatgaaattaccaacccgcgtaccacccgcctgtctcatgtgagctcggtttacggttccagtgttctccagcgagcatcacaaatccacataatgttccgagtgctaaatttggagctctgatgtagctgacagatgtttaaaatcacatttagtcggacaactccctgaggaggacacagctgcagatgtgaaagagagcaagttattccagttaaggtcggcgggaactcggcctgaaaaccttccgtctccatccgccttcttcagacaggaggatatgggcgaaggaactttttcatgcggggtccgcccaccttcggccaaaccctccctcacaaacctccatttgaattgttgccaagataaacatggaggctgtatcttgggcagagtgtagggtgctacacttagccttaattgagtacgaaagaggctgcttgctttttaaaaacaggcacaaagccacattttggagcctgctttgcccctctggtggcatcttagtcccgaaaatgaatatgattctggaattttgctcttcatgatcagttattcaaacgtcaaccattctggatgggttgaagggccattcaccctccctcactcctctgacatctcgaatagttcctccttcgttttttaaaaacaacaaaattaaaattatcctaaaatctttgcaagatcacatattttaggcttgtttcaagactcagactaaaatggatttgtttaaaaaaatggtctgtgtatttgatgtgggagactagtgacctttggtgtgttgtgccaaaaaaaaaaaaatgtttgatgtctaaaatttccctactgagcttgtattgtttctggtctctttctgtgatttttccatcctccatcattccccacgttcaaaatcagttctttatttactcaacggaggttttgacatagttatgagctcatcctgatggcagcctcaaatcaatgcaaatcacattacgatgtcaaaattgatgtgatgtgagtgtaagttaaatgattgtaaaacaattttaggacagagaccaagagagactcttaccatgtcaggagaatggtaggaagggattaatgggagaactctgccagattcatatcaggacaatatagcgtgcacactatattggctttactcccaatttaaagttcttataaaggcatccttagagaccacaaaataccctcagaggaggttgatgggcagctggctagggtgatagagtgggtttggctcacaatgttttaggcactgagatgagcagatagtatgttaagtgaatgacaactgggaacaaaccaaactcagtcagtgccgatgaatccctagagcctagtttctaaatggtcaggctgggagacctatagctaggaaaggagattcagtaatggggtaaacaggggaagagaaatagactctagggccagtgagaaaatctcaggtggattcctgtgctaaaagtaaaaaatcacacttcctaactccttggacttcaggactcagtctacgatattatcttcaattcatggactttcacagtctggagtggaacattatacaccaatccatgactataaatgactttgggagggtggaattggaagaagaaaggggaagcgcattaacattagaagcaaatctgtactgtgtggtttgttgtaatgctttttcctttacttaaaaaaaaatccattgaaattaattgaatgacatgtgcataaacacacaccctttcccccacaagaaattttactggataaagttcaggaaactctataattgactagcaagtcctttgacctctgtgggtgccagtttcctcgtctctgagaaatcacagtatttctgggagaataaaatgcaatagataaggatagagttttgagaagctgaaaggggggttagagggcaaaatgttactgcaattatacagggcataaagggtactttataaatattgtgactgacggtgacattggtgcaaattcctgtaagagattcttttagtcatatatttctcaaggactttgggcactaaagataaatgttcagaattatgtattctggatcctattaaataaaatctaatttgacttgtggacagagaagtctttggagtccgttttgaaccctaactccacaactcacttgctctgatacatgtgggcagattagttaatttctcttagctttagttttccaagactataaaaagaggattaatattaccttccccctaggactgttgtgggaaatatgtgagacaatgcatataaactgtctaatcatggctgctcccatcactgggagatctccatgcaaagtgcaatcattatttgatggtaacaaacattccttcttctcttttaccaacagagaaactgaaataatgagaaaagtaataagttgcagccacaggatgagataaggcagtagttgggaataaaccccaggcctaaaagctgccatcaggtcatagtaggaactgtttgattattttctgcagaggaactcttaccttaggagttttaggaactacatccactcttctgatgtctgggtattggaaaagacagggtcattccttcaccagagacctagggtgctctgctgctgtgattgtgaaaatgtggggcaacaaagtgcagtctttaatgctctgttactggcgagctcaaatccctgaagctaaagagcattccggatgccctggatttccctcacattcactttgtgtggagacttaaatcattctgtaattctaaatactgtgggaacagtagcaaatgctatcacacactggttactttctacttatcattatttaaatgatcaccaacaaagacactggtttagaaaagcacacaggagttggctaagaccagttggttgggaatcatgtctgccggtctcaacttatgtccatttagcaaagtgaagtcttaaagacaaaagagggaggagtttccaaagattctcactcctatctgagtgaggaatgcaatcccaatctccaacttggcagaaactatcacatcaatctctacagggcattgattttaattggagccagagacatgggtacttcaaacaaaaagaaatgggttatcatcaccatgccaggtaactttcagtgctaacacacattttctcaatttaagtggacattatgtgtgcttatgggcgcaaaggctatgcatgaaagttctacttggaaacggtttaaatgtctatctctgggaatcaggtgaatgaattttggccaatctgcacacattttccacacttgtaaattgagtgaggcggatcactgcactctcacgcatagttaccaactggctgcgttctaaagtgaaaagccaggtactgagttgtgtgtagaacatgcaaattttttccaagtatatgggaggattcaaaatatgggcataaaacttaaataggattcaacagaaattaaagatagactttttttgttgttgttgttctttgagaccaagtctcgctctgtcaccaggctggagtgcagtggcgtgatcgtggctcactgcaacctttacctcccgggttcaagcaactctcctgcctcagcctcccaactctaggactacaggtaagcgccaccacgcccagctaatttttgcagttttagtagagacggggtttcaccatgttggccaggatggtctcgatttcttgacctcgtgatccgcccgcctcggcctcccaaagtgctgggattacaagcatgagccacagcacccggccaaagatggacttttaaggaaaaaaagaatttggtttgggcctagagaatgtgtatgaaattctaacagtaccctactcctgggctcccaagagaacacaatctctgcctgtgaccaatccccctcataatttcctgaccaagaaattgcctcaaagaacaggaaacatgaagataagcaaacttgagctggtttctctgagtcctgcagccacttccctgtggcagtattctgattttcttttaacctaagctatgcagatggacaggtgttatttatggcaaacttaatactattcttcatcaaatgtttatcagatagtagacaatagtgtcaagggctttatctatttgaattaatgcaagtatggaatccttatagcaattgtacaaaggtagctgtaatttacccatcttgcagatgataaaactaaggttctgagtggctagctaaattgaccacatcaaagaacaaataaagggcagaatttgaatgtgaactcatttgactttgaaaccctgctcttaaacactacctagtactagtctgacttcacgaacagcatctgtattaagccttcatggttggaagggttcttgggctgaattagccaaacaataatattttctttagccttgaatttgtattctcctcatcctccctaatttcagtgctttaccaactcattgataccactggcaaagagagttgactttttttaaaataataatttctttaaggaaagcaaaccacacaaacatttgtgtttgctatttaatggaaggttatgtttgcttagcagaaactaaaaaggaactcttgaaatgacttttaaaaatctaactagaaaatgaacatgtgctgacatgttctttattgctttcagcaaaagacaaatactatatgtgcccaaaccttccagagttgctgtgagcaaaacccaacacacccaaagtagaattaggggatggagatattaacagacttgagaagaaggatggaatttgcttagatattctctgaaggaatagctgctctaccaatttctgataatggctggaaacaggaaaggaagtaataattaaaatggtcagtatggaagaagattggtttcattcctctttctgtattccatagagatctggaagataagctttaatatcaaactttaacatcaagctttaacatctgctgagtttgaatcctccctcttccacctaccacctgggtgacctcaattcatttataaaaagaggataatattagacaccctctgccccccaccacactagtcaggagaggcttagttatgctgcagtaacaaacaccagttatcagtgatttcaaacaacaaatatttatttttcatccatgctgtgtccaacatgggtcagcagggggtcactgagccttcactaccttataatgatgcctgcccaatacaaggctttaggatccaccattgcaaggggaaagagtacctcttattagatgattatacatggaagtgacacatgtcacttctgcttaaatttcatccatcaaagcaagtcatgtggccacccctagcttcaagaagagaaccagaaatcttggtaagcactggtcatgtccacttctaccacaccctccctttaggattattgtagagattaaatgttaattattattgttatgatttacttcaatacccctagtgcccacatattagataattaaaaagaatgaacaacacagtgaccatgactttcagcagctcagaatttaatgtagggaacaaaatcaaaccaaaaaccaaactacaatgtgataagtgccaaaagcccaaagaactgtgtgttgagagagcagaagagaatcaatgtaatcttttagatggaggagtgggaaatgaggtcttcacatgggaagcttcactgggaaggtgacacttctgagttttgacaaatgagtaggagttcatagggtgaagaataaggagaaaggcaaaccggctggagaaaacctacacagaggcggaggcaggagagggtatagtgagtaccttctgggcaggattcatgctggggaattgtgggaagtgatggtggctaggtaggcagagtctagactagcaaacgccttgtatatctatctatgccatagacaggaatttttttttaatgtaggtttaccagtgtcgcacctaacagtgtgtctttaacaatgagagcagaatgtgcagtgggaagtcctctaaactcacctcataatctgttcattaattctgctgaaggaacaatgttcattagctctgtgaactttggcatctcaaggtctcatggcctttatttataaataaaaaggtttaaataagtgaaatttgaggttctttcacacattcaagttcaaggaacaggactcagatcggcaccctctgtggtgcttcagccccaggaagatggccatgccagtgtgactcataattttacccctcacctaggttcctgagacactatttctgattggctactagttttcaggggtagtatatctttctggcacagataattcatgataatgactaaagaagtataatacctatgataagtgtgtaaatttaggcactaccaagcttactctttggatttcaaaatttgtaacccagagaaaaatatactgtactttacatcacagaatcacacattttcaaggtctcccgtgtctcagaattgctgatttgactgaaaacacatttctgttcttgcactattcagaggtgccagaaggggattctggtcaaagtatgtgactcgcgggacatctagccttgtatttggtacttgatcaagacattatgattgttatacttcattctcgcctctatggagtctgcttgtgttaatgtctgatttacccaggctatttgaggcactatgttgaagtggttaagagtgtaaatttcagagacaaactatttcctctcttagggcctcagttttctcatctgaaaaatggaaatgatactaggtttcttcataggtgagaaaacagcttagggcaatatgtggtctagcacacattgtgagtagtaagtgtaataataatagtaataataatgataataataaagatgttgaaagagaggtaaacccaatagatattcaaggaaaactgaagagaatttgaggcaaggggaagtgaaattcatgacgagaatttgagcaggtaggatgtgattctgactcagagaaattatatggtgtctggaaagggggcatgtgggatctctgagtgtctagaacaattttgttacctaaaaaatatcttaaagtcctaagccaatgaaatttcatatatttggatttgaagaataatttttattcttcatattaacattgttgtcaataacagcaccatcacaatcaaaagtagatttactgtgaagataatgaggctgtagcttcagcccctctcatttgcagggaccccttctaaaactctgtgtttgctttgttttcatttttttttctttttcttgaagagggttgccactgctcccaagcccaacccaaaattgttttacttcagggtcctcaaaatctgaacctgccttaattgcactgattgggaaataggggggtattgttaaggccacacattctggagtcagaatgacctgagttcaagtctcagctcagctatttgctaactaggttactttaggcagatgatttaaactttctgagcctaggcattctcatctgtccaaggagaataatggcaatgtcttcttcttcttcttcttcttttaatttaaataggtttttgggaaacaggtggtgttttattatatgaataagctctatagtggtgatttctgagattttggtgcactcatacccaagcagtatacactgtacccaatgtgtagccttttatccctcacccacctcccaccctttctcccaagtccccaaagtccattgtatcattcttatgactttgcatcctcatagcttagttcccacttatgagtgagaacatatgacgtttggttttccattcccttagttacttcacttagaataatggtctccaattccatccaggttgcagtgaatatcattatttcattcctttttatggctgagtagtattccacagtatatatataccacaatgtattttatccacttgttgattgatggacatttgggctggttccatatgtttgcaattgtgaattgtgctgctataaacatgcatgtggaagtatctttttcatataatgacttattttcctctgggtagataccagtagtggtattgctagatcaaatggtagttctatttttagttctttatggaatctctatactgttttcatagcggttgtactagtttacatttctaccagaggtgtaaaagtgttctcttttcaccacatccccaccaacatctattattttttgattttttgattatggccattcttgtaggagtaaggtggtatcacattgtggttttgatgtgcatttccctgatcattagtgatgttgtgcatttttcagttgtgcatttcttcatatgttggttgcccatttgtatatcttctttcaagaattgtctattcatgtccttagcccactttttgatgggattgtttgttttattcttgctaatttgtttgaattccttgtagattctggatattaggccttggttggatgtacagattgtgaaaattttctcccattctgtggttgtttgtttactctgctgattgtttcttttgctgtgcacaaacttaccagtttaattgagttccatctatttatctttgtttttgttgcgattgcttttgcattcttggtcatgaagtctttgcctaagcctatgtctagaagggtttttccaatgttatcttctagaatttttatggcttcaggtcttctgtttaagtctttgatccttcttgagtagatttttgtacaaggtgagagatgaggatccagttttattcttctacatgtggcttgccaattagcccagcaccatttgttgaatagggtgtcctttccctactttgtttttgtttgctttgtcgaagatcagttggctgtgagtatttaggtttatttctgggttcgcttttctgttccattggtctatgtgccaatttttataccagtatcatgatgttttggtgactatggccttatagtatagtttgaagtcaggcaatgtgatgcctccagatttgttcttttgcttagtcttgctttggctatgcagggtttttcttttttttttttttttttttttttggttccatatgaattttaggatttttttctagttctgtgaagaatgatggtattttaaagggaattgcattgaaattgtagattgcttttggcagtatggtcattttcacaatattaattttatccatccatgagcatgggatgtgtttccatttgtttgtgttgtctatgacttctttcagcagtgttttgtagttttctttgtagaggtctttcatgtccttggttaggtatattcctaggtattttattttattttgcagctatcgtgaaaggggttgagtgttttatttgattcgtagcttggtcgctgttggtgtatagcagaactactgatttgtgtacattaattttgtatcctctaactttgctgaatgtatttatcagttgtaggagctttttggagaagtcttctttagagtgttgttctaaatataaaatgagatcattcagaagtgcacaattaatattgcttgttataactgatttgtctttcccttttgagtaataggagggtctgagtttactcatgggtgtcccaaatggcgaattagtcattcatccctttaggaatagttccatgctttacttttctccgaattcctttccttcatctccccagcagccagcatgaggcagctcacattagagaaattcacctagaaaatgtcataaggattgtagaagtgactgtaatttcctgggcttttttatctagggcactttattggcagaagatgggctggtaaaatttgatgcatatgggtaaattctgagtgcttttttaccaggctggctagtcacgtgatgctaagccaggaggtccttaggatgggcaggccagtcacttctaggcaggctcacccactctaataacaatgattcacttctccacaggctcccctgagaagatgaatgctggatttacagcagatttgtgcaaaaagccctatggagaaagaaacatagggcagtggaaaaatgctctcaaggcttacgttctttagagctttggaaatcaaatggtaatgtctgggtcactggggaggctgctcctaaaataactcccctgattcctggccaaaacagagggcttttccccctttacaactaacacaggatgttggatgcccagcagtctcagtatactttgccttggctgattttcatttctaatcccattgctttgtaaagtgtagaattattctcttttgaccaagccaacagtctagaagttgtgggtgggacttggtcttgcaaacagaaatattctattgtggtttgcattgtttttatcatgtcacagttcagactcctacttccaaggcaatctcttttcttttaaatacacacacacacacacacacacacacacacacacacacacaccccacacacaccacaaatgccaaacaacttctacttaaaaaaaaaagtcatcatgcatggctgccagcatgtacatcactcagattctccctttaagagaacctgctgtgagaaaggtagctggctgctggtgtcagctgctatcagagcacaaaagctgggccattttcttcctctaacagtcaatctttgctctggggatctgcagtggccaggctgaggtcatctcaaatttgaatcgttgtctttggtcttcatagccagtcctccttccctccttctttgtctcccagtgcaggtgtcagacctgtgtcactgtctgaaagctgtccctgcctactcctgttccctgtaccctttatctttcataggcattttccttctaatttggtctttgtgtctgttttgcagaggacccaaattaatacaccataaattctagttttagtgaattacaaatctcccagggtgaagactctagcatcttgtcagatgtttgagctcacattgctgcaaacccaggaagcaatatataagagatgctataaagcaaaaggaggctgggcacagtggctcacatctgcaatcacagcactttgggaggctcagtcaggaggattgcttgatcccagagtttgagaccagcctgggcaacatagcgagaccccctcttcaccaaaggggaaaaaattagctgagtatggtggcgcaaatctatagtccttgctacccaggaggctgaggcaagaggattgcttgagtccaggatttcaaggcgcagtgagctacaatcacaccactgtgctccagcttgggcaacagagtgagaccctgtctctagaaacagaacaaaacaaacaactaccccctgtcaaggagtggttggactcctggatgaaaataccaccaatacatactttaagtctaaccaggagaacacaaaacctacaaattgagcacatctgaacaataaagtcagaccttcccattttgagttagggtgcatttttaaaaagatggccaatggcagaaaggctcagaaaggaggaagaagtgaggaatagagaatttggatgtggaagttgagaagtcatgtgattcagtgtcttcttaaaggtctcagaggccacagaagggaagagagcctgccatggctgtgctgttcccagagaaattttgattttaaatatcttggtaagaaaattaaattctacagccttataggggagaaacgttggtgtaagattttttcataaacagaaaggttctgtgaattttggcagtgctcaaagaaggtattcgagacaacacttggttttattttacgcttttcaaagattttgaactgcatatggattcttctattaaataatcactaattggatctcttttcagacctaccatagttcagggttgcgttatttcaatatgcaagctcaccctctgaaggcttctcaatggtggcgctattggcattttgggtggactatcttgtgttaggcaggatagtcccatacctctcaagaccatttagcatccctggcctgtgtccattaaatgtcacttgtgttccccacttcccagtcattgaaaaaacttgaaagctctccatatatttcccgatgccctcctcaccttcaaagatgtgctaccatgccagattggtgaaaaacaaatgaacagacaattcccaatgattagacatggccaaaccatgcaataggaccatgtgggaggtggctgtgggggggttgattccatggcccctgcatgctgtatatctctctcactagaatgacagtttcaaaaatgaatcaggatggcttaagcgaaagaagaacttattgattcctacaggcagacaggccagggctgaattcagagctcaaatgatgccatcaggtctcagtttatctccatctcttggctctcccatcctctgtgttaactttattcttgaccttcctatggggaccctggcagctctagacttgccccacagagtggcatggctaccagcagctttggctcagatcttttgcttcaagtccagtgggaaactcttgcaatgttctgagtcccagtctgacagaatgaatttatttcaagtttattttacctctgaaccagttggtgtggccaatacaacatgaagcactgactaactcaggcttaggggttctgaccactccagcacatggtggcttgccccaccccaggccacacggactgagggtagtgaaaggaagcctactcaaataaaacctctggaaagaaaggctgttaagccctgatgttagggggacaatcaacaaatgttcactagagtcagaaaattgctggaatctataataaagatcagtgaaactcaaagagacatatcctctttggggagaaagcaatataatgcaaaatgcaggtgcatcaaatctttcagacttctttggccacttttaaacatatttgacaaccatgagattgaataaaatattttcatacacagggccctggtttggcattcacagggagtggatatgaactgatacttctctgaatcaaggagtatttacaatgagattcctgagaataggttgtctatatgtaaatagggctagtatactaagctgaggtcctatgcatgaaactattttattagtcctccctccctaatttcatgttttttcactgcttgcttgatgctttggcagaaaaaccaaagtgacagctatattaggcaggtctgagccgtcattcttacccatcatcaaactagggcctggcctaactgactcctgctgaaacaggaggctctgggtttacaaggtcttgatccattatttgggtgactgccccacaacaggccaaagacagaagtcatggatgtctgaggggcattttaaaaaagggtttcagaattgggcaacaggggcctgagaagtctcctttatccatggcttacactgctttgagggggccttagaggaatacaatgtgttccttctttaacttgtagtgctgctcttctttggacttgatttatgtacacaacaatagaaggttttatttgaatataacttctatgactatagcacagtttgttattttgttttatcattattattattttttgagacagagtctcgctctgttgcccaggctggagtgcagtggcaagatcttgtctcattataacctccgcctcctgggttcaagtggttctcctctctcagcctcccgagtagctgggactccaggcgtgcgtgaccacgcccagcttatagtgcagtttgaaatccacttgtctaaccaaacccttcatatttctgacaaagccctgagaagaagagtcatttctttaagccagccgggaacatgagtcttctaaactttgaggccctctttgacaagaggagagaggagtaaacgaaacaatgacacttatttctacctataatctccgttgatcgacctttgtactccacggtgagtcttgcagctaagagacgcaaattagacctatttgcactcctagtgcggtcaagtgcagtcaagatctccttctccttgagcatcaggtggtgtctcctggctgctctccacatcttttattctgaggatttagctggcttgcctcagtcttcaggccaggcactccaaaggcaatttaggggacaagtcttgcttgttagatactgggtcccttcagcctcagttgctgtcttgtgcctcaggggttcctaaactcgaagtggtggcccagagtttccttcaggtgctatgacactgatttgagaaagaaacctaagtttcagctgcccactgtttccctctgtgagcaacttgagtctggttccactcaggatcctctgagaacttagctcaatacttgtccaatagtaaacactccataatgtttgcctgtttgaatctataatcaaaatctccagtaggagaaggcccttgtatttctgtttcattttttttgctagttggtgggagaacacacttttcaaaatactaatagttcaccaccggacaagagatacatacaaccccaacttccaagtaaatggaaaataccttttctgggtacgtttatttggaaagggtttcttcacttgaagaaagaattaacaaacccctgtttgggaggataaaacaagaaattcctttgggatgtctcaagtttctagagagccaggctctcgcaggctgaggtggcttccacactgttcatgaactgctcttggcgggctggtggcctgtttgatattctgaggtctagcaaagatttagctccagggggtcatcaagaggtcatggtcttgatcatttcctctgttatttatctttggcttgtggtactggagcctgcctttgatacagggcatttctaccacagctgcacagaatcaagcatttcagtgatttggtttgaggtgaaggaggcttggcttctaatgctgcgaaaatgtcactgggtacatctgagaatatctagctctgtccttcactgatgagcaaattcatttctgggggtttaccagtggcacttcccagacttgggtcaggaaaggaatcctcctggtgaggacagcagttttcagtttgagtaattccattttcagttccttctgagacatttttcttgctctgagctggagataaaagcagcatgtctcaggcctctagggtggatctctacttttcaacactgtttatgactcacctgtgactgccctcagtgcagccaaggggaccatttatgctgaattagcctttggatttttcttcttagtgacagcaaaacttccgtgacagcaaacaagtaaaccacaggaacatccctggtctgctcagcacagcaggctcttgggttctcagagagcctgggaggacttttcagcttgtcttatgtgggtttgttcaccccgtccggtttcatttttatttaaaacaattggtatctttcatcttggttgccaagtatgggttgcatatggttttgacctgatatgaagggcccaaatcaaatacccaggacttggcctggaaaattggttgtataagacctgctctcttgttcccctaaaaagcagcctagcaaatggaagcaatgggtcccaggagttcgtttctgtatgcggctctaactctgccacgaaggccaggacagatagtgtgcagtgctctgtcatgtctaccagagaaaatgatgcaacatgtgctggagactttaccatctgtgcaagagtgcagccctaggctcaatccaaaagaaaaaggaagtggcattatagcagggatattcccagtgagtcaaattcccagaacagcctgtccctcctcaaggtggtcagtgtgccccagcatctcacctccagatttggactaaaacagaactgttgcgtgcaggggttagagaggactagagcagtgatgtattttatatatcatattttctagcaatggttttccatctgaaacccagtttacattgtggcccagggcacagaaacagaagctttatgaaacaagttactgtttccatgtgtcagcattctaattttcctttccttttcctgttcttttttctgttattttaattttttaaaaaagcttcttgactcactaaattactataacaaaccacttatgagtcaaagcccatattttgaaaaacaacattgcattagtgtatacaggcagcaccttgggaacatttatagaatatggattcttgggtccctctccagggattctaattcagtcattcctgggcccaagaatctacgttttatgttaacctgacctaaatgtgaccattatgagggcaggaaacggttttgatccctaacatatcccaagtgctttacatgaagaacttggtacagcacaggctcttggtcattggtggttgaataaataaatgaatgaaaaagtattgatcttcaaatgattccatccttcaaccccagccgtgcctccctttgcatctatactgttgtcttcgtttttttaagatagatactcaaatagtctctagacctttgaattgcaaaattgctttgaatctccaagttggaagctgccttgaaagtctctaatctagggattctcaggtgtagaaactttgtctcgctgctttagaattccttggggaagtttaaggcaaatacatatccctagaccccagccctggagtttcaatccaggtagatagggttcatggcccaggaatctgcattctatcctccctcgggtgatgctgtggcccagccagggttgggatgcactgttcttgtgacctctccccactgtggatcactgtggatggtggtcacccagcctctgctggaaacattttgggctggcagaaagaaactcccagaggtctgctccacattgaaaagctctgcttattggaaatttcttactgatattagcttcaatcactttcctactgctgctagtcttggttctgccctctggagcacctcaacacaaggccaattggctgcctgactgctcattgtgaaaatacagaaaaaatataaagaaagaaatgaaaattttttaaaatcccaccaccttgaagacattgaatatttcttttggtcttaatatatgtacacacataaatgcatgttatactcacttgatgttttttagaaatgacaagcatcctgtattcttgacttagcattacatattgtgggttttctcttaacattatatcacaaaaaatatcccagatagaaaaatttgctttaaacccacattttaaaatgactgcattaaattccactgttttgatctattagaatttattcagccatttcctgttagtgttgatttaggttatttccagttttccactatcataactaatgcttaaataaacatattgcaaataaaccatcgtctgcatcctggattatttctttaagccagactcctagatgaaatttattgagttagaaaacatgctttaaaaaacacttgatacatattgccacttactatgcgaacaggatgtgaaagttttcacttgtaccagtcattttaatccctgattagaatttagtcattcaaaaaaaaatgccaaattgataggttaaaaaattacgtttcattatagtttttaatttgtatactttttgtttactcataaggcagaacacgattttaaatataaacacacatacataaacatacatatgtacacattttgattactcatgaggcaaaacatgttcatatatatttgtgtgtgtgtattttttcccatttgttttggcatttcccttaaacaggatgttaaaagataaagaaatagatttagtctatttttctgctagagagaggggcctcacacttcttgttgatttgcaaatgcccttctcctctttgtaagtataagaaatatcaacttctttatttattgtggtaaatatacataacataaaagtgatgattttaaccacatttaaatgtgcagttctgtggcattaagtacattcacactgttgagcacccataaccatcatccatctccagaactttttaccttcccaaactaaaactctgacccactaaacactcactctccattgccctcttctcccagcccttggcaaccaccattctattttctgtctctgtgaaactgactgctctagattcctcatataagtagaattatgtaatattattttttgtgataggcttattccactttgcataatgactttaagcttcatccatattgcagcatgtcagaatttccttcccttttaaggctaaacaatagcccattgtatgtttataccacattttatttatctattcatctatccatggacactgggttgcttccaccttttggctgttgtgaataaagccgctgtgaacattggtgtacaaatgttcgttcaagtccctactttcacttcttttggatagatatccagatgtggaactgcagatcatacagcaattctatatttcatttctaaagaaattgccgtatcattttccatagtagctacatcattttacattcccaccggcactgcacaagggaatccaatatctccacatccttgccaacatttatcttctgttttgcttctaaataatagctatcctaaaggctgtgaagtggtatccttaaaaaaaaaaatcaaataaaacctgactgtgtgctccaatttccaggaagtcagatgggaaatccaatcgccatcatccaggggctcttcgcacatcctagaatcacaccagcacttggtacctgaaaatcaaaggaatatccttcaaccccagtgccacccaacacaatggcctctgacaccttgtctacactaatagtggttctttgctttcacggaacatatatagacctggaatggggagggttctggctctataggtggtcttgctaactttttgaggagctgccaccaagcaggaccccccattttacattctttatcctaaccttgtcccacttatttcagttataaaaaattctatcagttggctttaaaatactcttcataattgttatcttctattaatcttcaaattattatttaaaacatatagaatatataaaaaattaacatattcctttgaatgcaggtctcagttttaatacattttaacattttgccttataaaaactcttgcacaagggtaaaaagagaaatgtgcaaacatatttattgcaacaatgttgcaacagtaaaaatttagagcaacctgatgtctatcagtagggaaatggacaaataaattgtgatatattcataaaatggaagagtgtacagtagtaaaaatcaacgaaatatatctatgtatatcgacatggaaaaatactaaaaatacaaccctgggggaataaagttctaaatacatacaatatgctgtaaaattaaaaacgcacagaacattaccataatttatggatacatacatatggtatcaaagtaggaaaatatggtggtgttactacaattaaaaagacatgtaagttgggcacaatggctcacatctgtaatcctagcactttgggaggctgaggcaagaagatcacttgacggcaggagtttgagtcttacttgggcaacatagtaatacctcattagaacaacaacaaaaaaattagcctaatgtaggggtgtgtgcctgtagtcccagctattcgggaggctgaggcaggaggatcccttgagcccaggaatttgaggctgctgtgagccatgatcaggccactatactccagcttaggtgacagagcaagacactgtctctaaaaataacaaaacaaaacaaaaacatgcgaataataaaaaacaaaaaataaaacagatggactttagtcctatctgtatcatttttaactcttaaaaaattgagctaaaattttaacttttgttgttttctctacattaaggacatacttttattataaattgttgtatatgtatttttcttaactggtctgtaatcttttagttttgttttctaagagttttaaaatataatcaagtagaccaatttgtatttttatgatttcttttgttaatttctagaacttcttttgcaacctagaaataggttaaacatttatctatattctcctctatatggttttgggggaggcatgtattatatatttgtttatatttatccctttaatccatctggaaattatagtaatatacggtagaatcacatttgatttttttctaaaactaaataccttgctaattttcctcaaattatttgttaaataattattgctttctcattggttttgtattgattcagttatcacattaaagggctattttatagttattatttccactgatttgtatcaattcctgaatcaacagtaaactgcttatttatctaattttatcgtatgtcataatagcagatgaaagtgccattttgcaggaaggtacttactaccttcttgctcaaacttgttagttatttttacctgttaatttgtttccagatggacttaaaattattttttcaggttaacgaaatcccactgtgattttgtgcaacctataaattaatcaggggataatggaaaaaattcataatatttgcaatttccctctagggacatggtatatcctcccttgttcaaatgtttcaaaatgtcactccataaaattttggaaatatttccttgcataaattctggatcctaacgatagtcctttgttgattataaaccatgctactataaagacacatgcacacgtatgtttactgtggcactattcacaatagcaaagacttggaaccaacccaaatgtccatcaatgatagactggattaagaaaatgtggcacatatacactatggaatattatgcagccataaaaaagggtaagttcatgtcctttgcagggacatggatgaagctggaaaccatcattctcagaaactatcacaaggacagaaaaccaaacactgcatgttctcactcataggtgggaattgaacaataagaacacttggacacagggcggggagcattgcaaaccagggtgcctgccggggaggtggggggttgggggagggatagcattgggagaaatgcctaatgtggatgacgagttgatgggtgcagcaaaccaacatggcacatgtatacctatgtaacaaatctgcacgttgtgcacaggtaccctagaacttaaagtataataaaagaaaaaaaaagatagtcctttgcattccattttttgttaacaacattatatataagatacatttgctttgattattttggcatacagaagagttattgacctttgaatgtttgtaattcagccactctacttatttctcatcaatctaaaagttggtgcacctgagttttctaggagtataatcatattaacacaatttgtaaccactttgccttctgtttcccaacattcacaccccttaaatattttccatgccttaatgcataccctagaaattttagaacattgatgtaagaatctttgacttctccctaatttaatatagatggttctagtgatttattcttaatttaatgttttttatagttttaaaatagaagtccttattcctttaaggtagtatcccgtttctaaatttatcatgttttagcagcaatgtatattaaagtttgccaaatttaacttttcacaaattttagcagatttgtcaaaaattttcagcatctgttgaaataattataaagtttttattgtttcaactattaacatttcttagtatgaatagttaaaatggtttatttagtgagtgggtttcctgattttaggcacataatgaatgggtttcctgcttctaggcacattcttgtagctctttcctataatatagagctaattggttagagtgctgttcagccataatggtcaacatctcaatttctcaattaggtgatgcttgccaattttttttttctccacaacggtctctgtatcactaacattcagttttctgacagtcttttggttcacagaaaatagttttgattattttccgaaggataaataaacatggcttattgtaatggttaaaatatatggtgcaagtttgaggttggcaactgtcttgcagaagtgggtgcaactaactctaggcctaactcttgccacctttagagcaattcaatttaaaaagtatcgaaaaaataagaatgtcagtcaataaaccctgcttacatgtcattggtaggtgataaaatcacaataacagaatacactgctacagaagctatgttgattgtttgcacaaggacagcaccattcccctcccctctcccacgctagcacacacatgtgcatacacaacataccaactacatagagatggcccattttaagtaccatatttctaatggtagagcaactctcccgccttcccccaacctcttccaaaatataatgggatgtagtataaagtaaagactttctgaaatcacctaatgactttgaatagaaaccacataaagcaaatatagatactattgtaattattgcctctgttaaggatgaggttagtacatttttgttctgtgagataattctgtgtcagcaagattttcctttggtacttactaatattagaataaaaaaagttaattagttaagttcattcattcattctttggatcaacagatatttactgagtaactcctatgtgccaggtcccacttttgtggctattgcaattttggcagaaagcagatattgaacaagtaagtacacatggggtaagtatcacaagagtggggaggctagatcggctgggggagaacacagtgccatgcaaggtctctgaaagagcacagccacaaaccacagacagcatttattcattcaagagtcagtaagaatttttgaagaggcctaccttaaggtggcacttaaatacagtcaccagtgagttctacaaatactgaagtggcttcctagctagatctaaagctacctatagatgtagtgacggctatcaaaggggattattttcctaaatcatattttactattataatagtaataataatggccagcatttatggagtgttttctctacgcaggacacaatgcttacactttgcatgtacatactataaccctcagaataatcctacagtaggtaaaattgtatccacatttcatagacgagggccctgcggctcgagacagagacaaaggaattggaccaagatcatacatctagtaagtggcatattcaggatgtcaccgaccccaccaggaattgagctgtttaaaatgaaggccagggacaggaaatgaatctgcatacttagccaaacacttaggagtgtgaaataactcactcctagttttcacagtgtttcggagattcactaatcttcagcagaatccaatccaagcgtgcaattctttgcattcagcacatatggttgctaagaaaaaagacaacgttcttgcagagaatgcttctattttataccatcactactcctggtaatgacctttcctagtgtctttccaaggactacattagagcaaaccaccttttccccaggtaagctgtctacttactcactgtagttggaaaacagaaagtggcccagagctggtcaccaggagacactgactgctattctgtctcatggttttgaagcaacctagagcttttaagcttctgggtttcaccatgttttgctgtctatccactaactctccttatcatcaattctcctgtgtcctatgtgactacagaggaaattggccttcacagaggcctcagaggcaccgggttaaactcttcctcccctctcctctcctcctcccccctttatgatcaacatcatcattgttattatttactaagtacttactatgtgttcagcactctcttaaggttttatatgaacgtaagcctcacaacaatcttatgaggtagctatcaataactcattttgccgatgacaaaggaagctaagtgagattgtttaactgcatcaaggtcacacaatgaggggcaaactttagattaaagcgcagatctaactgcagatgatgtgttcttaactgcaaagttataggcttgccttaagggatttacaacgtggcataggatcaaggaacaatggaccagacgtgtggatcaaagataagatcatatttacgtaaagtgataggtttaagatttagaggttctccttggacccctgagtgtctacagacagatgtgtggggggaggggttgaacctaaaacaggggtcagtaaacattttcttaaaggactacatagtaactattttagattttgcaggccatatggtctctgtcaaaaacacttatctctactgctgtagtgcaaaacagtcacaggtaatacacaaatgaatgggtgaggctgtgttccaataaaactttatttacaaaaacaagcagctggtcagcaggcattaaatggtatgcaaattctatgtgctcatatgcatagttgtctttgttgttgttattaggagatccatagctttctatagcttcttaaacaggttcaaaatccaagatggttaagaactggtctaaatggtttccaaacctctctaagcttagatattccacagggttccataattcaaccagccttttacattaacaaccccttagagattccttctccttagcaggctcttttgtgggattctgctgtgaactgttgagtggacaataattactgtctattgagaaggaaacgtgagtcatactaccattctaccttccttggtttacctggtcagatgatactggctaaaacacaaatatattccagactgaaatacagcagtttggtcctgcaccagatcatctgatgtttgctgagacttttttctcctgccacagacctctttctctgttctgctgagctttctgcacagtaagaacttatttgtgctgagcacactaatatgcagtttggattctgaagtcagccaggtcaacccaggtatggtgtggaggggagggatattgctggatgtatttgactgaggcgtctctgtatttgttcagggatcctttctccccaaaggaaacatttctcttaggactccctagcttcacgaattagagcatcttattcactgcctgtgaccttgtcaacatgtacctctactctgtctcccactccaggggtcttgtcttctcctaagtagaatctctgggtggggattgctgattatattccattgtgtacactacgcagcctggtcccaggctttgcacacgtgtgacaggaagagtaaagaattggtgtaaagaaaccatacaagtcatgttttagtttattagcactgagatccctgaaagctatggccagttttaaattcttgcatcactttcgaaaatcaacataagggttgtccaatcaacttgaataacaaacaggatcatccctctgggatggcttccagctttacattttaagaacagccacaacaaaaccctgatatattaaaacctggaagtacaaatactatgaatcataaggtgattgcattcatattcccggtttttctgagaatgtagaattaggcataggagaagaggcaggaaaaaaaatagaaggggaggaagaaatggcagaaactggaagaaaagaagagagcaaaacaaggggaacaaagaaacaaagaggaatcagatggaaaggatgaacgcacggtgagtctgtactgtaaccagctacagctgggttgaaattcagtgtcattagcatgcagctatttctcacagcaagtaccccccaaagaaggaaataaaccagcaaatgaaagtaacaggagtatgaatcacttagccagtacttacagagactttatcccatattagactcctgtatatatcacatcaggattagtgttaactctctgaaatgaaacatcaataagaagaccacatgatgcggactgtacccccaactaatatttcagttcagttttaattagcatgttcatctggcagcagcatggtgcctgtaaatagaaacgggtcatgaggggcttgggctcttgtcctggaataacattacgtgaccctggttggccaagatctgtgccttggtttcctcacttgttaaatgtaaataagaattctctgctctgcttatttcacagaggtgttaggaggatgaaaagtgaaaatacacacacacacacacacacacacacacacacacacacacacacacacgcttggatgagtataaaatgccagaaaaatgtaaaattgaccctgttctcttcagttaacaaggtagtgggtaggcggggggtggggaccatggcattttgcacagaaggcttgatgactcaacgaagtgtcttcctccccgccctccccccagtaatatctggtctgggattactgctgctttcttgatgtttttagacatactcttctccttcagaaatgccaaaggtgaaaaatactatttcactgctataatttgtcacccttgctgcctgagcaagacgtgcatagacagtttagtaattaagcttttcaacactgcatcataaagttttattctggcaaaggctatatttatcagctaacaagtattaaatcaccccactgctcaagccgtttctcacttgaatacgctcctttcaaaacagaacagctttccttggctggcttgattaataaaagttcttgtttggaaatactgtgatgatgtgtggccccgtggggctaacatacatacaccttggccactgttctacctggtgctgactcccatctcccaggggagtttgatatcttagccttgtgtctctcagagcatcctggccagctgaattttatggccgtctgggatggcttccaggaggagatatttctaccatttcatttctaatggggaagaattgaaagaaaatctaaatgtaaaataagttttcaaaataattaaaatagcaaagtaacaatgatctacatatcaagtagggtttttcctcatattgccatagtcttataaaaacagatgcagagttagaaagaatagatattaaaagtcattagtaatggcttagaggagtacggtctccaagcaacccatcccagctttacaaattccctccccctcctttggaggacataaattcataaaacaaatatagcattgtttttaaaggttcagggtgctttcagtcaaatggctcctgaattatatttgttaaaaacaaaatagttaatttgaatgacctttctaccatattttaagggtaaatatggtagaatatggataaagaaaatgtggtacatacatagcatggaatatgatgcacccataaaaaagaatgagatcatgtccttggcaggaacatggatggagctggaggccattatctttaacaaactaatgagggaacagaaaaccaaataccacaggttctcactaacaagagggagctaaatgataagaacatatggacacatacaggggacaacagaaagtggggcctacctgagagtagagggtgggagggaggagaggatcaggaaaaataactaatgggtactaggcttaactcctgggtgacaaaataatccgtacaacaaatctctgtcacacaagtttacctatataacaaacctgtatatgtatccctacatttaaaatttaaaaaatataaataaagacaaatgttagtcaaatatgggcgaaaataacaaaaaatcactatttttcatcattttatagagactacaaatttccttcttcctccctctgctttcaaaataagtgacattaaccacatgttggcatttaagtttttcaccaatttattgctaagaggaaacatataataatatgctatagggtcataaaacccactttgcagctatagaagcaagttctgcctgtgcctgtgtatgtgtatgtatgacagtggacatgtaagtgtgaaactttaaacactattacagtaagaagtcttttgttgaacttttgttagtttgagaggctgcaatgatttttctcctttcaaaatgctgaaatagaactcatcattttgcttttcaaattagcaacaggtagctggtttggaaggctggagattgatttctctccagctagcaagtcgtggggtcaggtcactgaagcatgtgggtgatatgctgaaccaccaacttggcaaatattgaactattttaagtgcatctattttctggttcagtaaattttttgttgtgttaaattcattaaactcgacacagtctaaatgccacagcacatactggagaacccataaagtaacagcaacagctataaaatatagcaaaaggtaaggatcgatatactttctctctgtttctatttaatttttatctttcatattaggactggaatttgtttgaaagttaaaaagtactgtgtggctgggaaaatcatgtggaatcttatactttctgaaaatctgaaggaaggtctctttatcagtcaagttgccctccacactaagatgatgacatatatgacctacaattcaggatcacttaataacttgggggataaatgagaaataagaattacactctgttacctacattttggaaaaatcttgttttgtataatttgcaaaaatattgattcaaggacacatccgaagacttaagatggggctttgataatgtgattattctttattcagaattgaaattttcataaggataatcaagtttttggcacacaaactgttattgtgatttaatgtaatttttttgagagagtcgtttgttattttttaagtaccacttttcctccaacaaggagtagtcatagcaattcagaaaagtagggaaggtgcaaggtgtgaggaatttccattctagcatgggttgtaactatcaaaattacaaaattgattttatactccacatgaaaaatgataataagtgaagaacaattttccagtaatttttcttagcaaaatagaaaacaaaataatcaataacagaaaattgtgaaaataaaaacccaatacacatgtagagaataaggatataggcactaaatataattctttaaagcttccagaacacatagggcagaagtgatgcagccatcaaagttggactgagtaaatccatcccctccacatgcaaggaaaggtttgtgatgcagagtcatttggccaggacagttggcagcagcatttgtaacctgaaaaagtaaaaagaggattgcaattgacattctgtgctctattgtgctgtcatggcaacacccacctggaaaaggttagtctacctggagaaatcaagatttctcacaagaagcaccaaacaaacaaaaaaaatgcacacacaagaaacaaaaaacaaaccaagactcactaaacgcccctcaaccccagttcaagtgtttatatttatattcttaaatgtttaaattttcagttattagataaggtaatcagaagtgggctgaacttcaaaattagtaggggctatagtctgaaggtttatccccctgaaattcatatgttgaagtcctaacccccgaggtgatgatattagaaggtggggcattttgggaggtgattagatcatgggcaaactcctcatgaatggaatcagctccttataaaacaggcccaaggaagcttgttggtcctttccaccatgtgaggacacagccagaggtgccatctatgagaatgagggctctcaccagacactggatctgccagtgccttgatcttgctcttcccagaccccagaactgccagaaagaaatttctgtttatcagccacccactctatggtattttgctatagcagcccaaattgaccaatacatccttcttcagtttctctccactactcctcatcccatggttccttcttcctcacatatttcctgagcgctgttctggcccaggctccatgctgaacattggagcaggagaattttaaaatttcacaaccttgtccttaaggaaatttcagtcctgagagtagactgaccccaaagcagtctttttaaacagctttttattttcatatctgaaagtatgaaaaaagacacagagattgtttttctggagaaaatattctcaaaatttggatggatgatggctaataagcatttgcagtaaggagaatgagtgggaggtgaatgtagttatgttggacactgagatgatttggccactgaaacaccaaaaaccctctaaaaaaccagaatatgaaaacttgttgtaatggccatctcacttgggactgcttcactgtacaacttcagggggctccattcacctggatgacaatatgacagttctagtctctcttatacagtgttttcatggatagtaatagagtaaggcccatgaggatttactcatttaaaaatcaggaaaaaaaaatcaagaaatgtaataaattctatttaaattatggttctgagatctttgttctagataggctgagtcagtatattcccttacagtttttttttttcttctagagatagggtcttgctctgttgcccaggctgaagtgccatggcatgatcatagctcactgcactcttgaactcctaggccaagagattctcctgccttagcttcctggtagctaggactgtaagtgcacaccaccatgcctgactaattaaaaaaaaatttagagatggggtctcactatgttgcccaggctggtcttgaactcctggcctcaagctattctcctgtcttggcttcccaaagtgttgggattacaggcataagccaccatgcctggcttacagagcctgcagttttcttaaagcagaaaaagtttgccatagatattttttatttatatgttatatttgcttttttaaaagagatggtactattatttccctgttgaacctctaaagacatgggcctctgtagacctgtgtcactgagatacaaaagtgaaatattaagagtatcctctcatgtttctggaggtctcttacagcaacatcatctatcacaaacatagctgataatcttgaaatcagcagacaagatctttgagtggctaaaagaggcagcacatagtgcagtcactgaagcacagacttgggtgatcaattagagcttttaacctgctttagatagaatgttatcaagttggattatttaatttgtcagtaaaacactacaggaagaagaaaacggctaggattctagatattagtgatttcagaatgtgataaccaatagtctaatagcaagggatatgtattagttcattctcacactgctattaagaacttccctgagactgggtaatttataaagaaaagaggtttaattgactcacagttccaaatggctgaggaggcctcgagaaacttataatcatggcagaaggaaagcaggcacgtcttacatggcagcaggcaagagagagagagcatgtgaaggaggaactgtcaaacacttacaaaaccatcagatctcatgaaaactcactcactatcatgagcacagaatagcggaaactgccaacatgatccaatcacctcccaccaggtacctccctcaacacatgggaattatggggattacagttcaagatgagacttggatggggacacagagccaaaccatattgggatgctatataaaaactcaaaacccagacaagactgggaagaatcctggcagactggggcaattaaatggagaggcaaataactttctggctcttaataggagctgagggcatcagttattagttgtcctacaatcattaatgttcaccatgatggccccagctttcaagaagcaattctaatatgcataaaatattcattgctagcatttcttgaatgtccactgcctatcaaatgctgtatatgcacaccccatttaattcacatagcaaccctatgaggtggttactattgttcttattttatacataagaaagttgaggctcagaaagattactacttgcccaaagacggaaagtcagtagataaagaaacagggattcgaacatagcaggctgactccagaacttacatttccagcactttcagaaatatttccataaagactcgatgaagtaaaacaaaacaaaaatttttgattagtcacttagctttaggcatctggaaaattcacatcaatagaataaagcattcacacatattcatatctatacatatatgtgtgtgtctatgtataatttgcatatacataaatctccatttgtggtaaaattttgatacattcctgttgacatccctgtatagataaactgtggcactattaaacattgcacaagtattaaccaggaaggagtttaaggaaaaaggttttgcccagtcatgaggtggtaatttattggtgctgtgtaatttaatttgatgagtggtaaatgccagatgccagatcacatggctggaaaactgggccactgattagccagtcggcagtttggatgaaatcaatctcactgcatttaggtggaatcacccattttgcaattacccaatgaggaaaatatgaaaacatggagcatgtattggcaagctccttcacccatgtaaagtaagagccctgcagtggaggagcacgtaattgtcaaagccacaatctcacaataatgcagcctttggctatgctttcagccacagtgaggaaccacagctcaatgactgtgtttaagagagatgtcagggctgaaacaaccccttgcaaatccaggttgctttggctcacatgtgtgccagggctggtcagaaagaactcttgcctgctctagagtagcaaatgcaatgtttctataaacttaggcgataactggactgggtatataaataaagctgaagaagtggttttatttctaagcaatttaaacccatgtcaatgtgttttgttatataaaatgcaaacgccaaagcccctcatggagagctcttcataaccaggatcttacttccattaaaatctcacctcgtgccacttctctcacctttgtcacccttgtccttgccacttctctcgcctttgtcctatctatattcaaactcaggttctttttcttgtacttctgtggcttggaacaaaccattttgctgggtgatgttgcattattcctcctctttgctgacaagtaaattgctcatccttcaagactcagtataaacatcacctgctctgaggcattgttgctcagccaggcaaggtcaatgccttttcagcatgttatttctatctattatattacttgctattttgcactgtaatgatgtccatgcctgtctcctctcctcctagactgcaagcttctaagaatagggactctgactcactgatctttgtatccaaggctgagaacagtgcctggaccatatgaaagtgtgcaataaatgtttattgtgttaaaaaaagatattgtacacagttgatcaaatgaagttcttgacagaaaacctacacaaaaagtattattcagaggctccccatatagctgaggagaagctcaaatggaggaactattgtatttagaagactcttaataatgatgaatgaaggggtgtcctctggcctcagactgtgcactgctttaatgactgtctcctgtcatgtattaagttgaaccacataaacttgctgattccgtcggtcaaaaatgggaaaatattgtcaatttgtatatggttcagcctaatagtttctttgcatcatgattactaattgtaaaagttcacacaaaaaagtgcttttggtgtgaaaatgaaattaaagatgaaaggaaagaggtaggcagacaagtaggctgagtattttcacaaaatgatagttgattatttgcaaaataattcaaataatgtccattcttcctttcatatctatgctaaagctacagtgcgtccctggactaggagacatttccccatagagaacagtcatttgtctggcctatagagtggctttattttaggctgacctattcagccatccagcccataatttggttacttaaacaaacctttctgaaacatggcaacaggtgacattcaagtgggtaggcaagaattaaggttttataaattctaattctagatatgaaactaatgtgatcagggagactggacaatgaataatcaagtttttcctgctacatttcctcacttacaccatgaatgcaaattatgccacatttcattgaatctaaggcaccataaaacacaacaatattttatgtaccaatgagaaagaaaaaatggtgtcaacatgacacaaaactttattttatacttaatagaaaagttctttcagatttatctacatgtatcttttgcaaacataaaaaggaaataaaagagaaatacattggtgaagccattctaaaggctcgcatttagagatggacttctccgaaccactctttaactcagacatgctgatgtctgatatccatgcacttcctatgcagtctgtcctctgtgctgtctaaaacactggcaatgtggcatttcttacaaggatgttccactgaattattttttcttgggttttcttctgagctgctgacactgttctccaagtatggattatgcttttttctcttcactgggaaagaaaggttttcagacagcaactagacctcatattctttcctcaaattgttcttaagtaatttgttagtttaaatatcaagaagttacagctgcccactccaagagcaccagaaataaccaagttcacacatgtgaaaactacatcttgactatctcctggtgtatactgatggagtggcatcttatagttgaagaaatatggcaagtactaagtaaggtgaggggagagggacagtaaatactctacagtttctcaatgcatgacaagtcaaaagataatgaatggtaggatcctttaagcggtgctttttcagttaagtagcattgttgctgttaggacttctaatgtctttagcattgctggtttaaacactccactttctcagctcacccaaatgagcagcgtcaggtgaaactgacagagatatactggttatctaagaatccatttgttcattttcaaaggaaggtaaatgtaccaattccagaaccaagtctggttgtcttcccagatcattcatcttgctgggcaaatttccccaactgtatcacagattatgggggtgacacaggtgcagcaactcctgacagacatcactaatcaattgtggcattctttccaggaagcccaacagggcctcagcatccttctctcttccgtgcctcaggcagccaccaccagtcaattggagttggcatttgagaggaattctatataccaaccctggattagaagattacagaaggaacacataattagaaatgagggaactaaatattctttactgttttttttctctcctttcccattaaattactatagcttgatgcattgcctttctccaagccagagaccctttaatgccaagaaacagatcacatcaggagccatttcctctagatgccgctgcaaacccaattacaattccttctaacaaccttctaagacccctctccaggacactacccttctctgggtcacacaggtgctttggctgctgtgtgaaaataaaatacaggcgttttagctacaaccatagttctacaaaattgtatgctaaaaatatcagggcttgtggaaaaaacagatttgggggcagatgactcaaagcctatggaactttgaaccaagcactaacaaaaccaataaacatcatagtaaagtggctagtacagttaacattcttccagcttctgcatctagctacagtggtacactctttgcagcctagatcctggggcttgtgtttctcctttgagatatgggtcttggaggacagttgcttctaaaatagaacattttgagctaaattgaaaatatgatctaggatgctgcctttttcatcagtctgtcatgttaatataggggaaatatctttgtggtttcaccatctggacttccacttttgctaaagagcttaacatggtagaaaaccagcaattctttaagccattggaacagccactatttgcactaaaggaaagcatgtttgtagatttttagtttttattcctaagaccttcacatttagcaaggctttatctttgcctgtaagaaaacttactccaattacttcaaaatataaatgagtttgaaaccaatatgagtctcctgatactgatctcttatttctcaactgcatacaaggtaactcacattaaaaaaaaaaaaaaaacctagttgcaaaagactgtagataattttaccactttcttatgttatattaccttcctgcaggtcattttaataagcttttggtatgcatgagccttgacagcagatggagatgtctaagccatcccttgtattttgatactcacactgcatcttttaataacaattttcggccaagcgtggtggctcacacctgtaatcccagcactttgggaggctgagacgggtggatcatgaggtcaggagattgagaccatcctggccaacatggtgaaaccctgtctctacttagaaaaaaaaaaatacaaaaattagctgggcgtggtggcacgtgcctgtaatcccagctacttgggaggctgaggcaggagaatggcttgaaccagagttggaggttgcagtgggctgagatcatgccattgcactccagcctggtgacagagtgagactctgtctcaaaacaaataacaagaaacaaaaaaaaaattttcatccactccaatgtctgacagtgactttttacttaaattgttcctgaattcagagaaatgctattgtttactggttgcacactaacttgactggggaaaactttgagtaataatcttcttgccttggcatttcccctgctcattgcgtatgtgaggtattgaccatactggcaataataaatagctctgaaggctaagatggtatggagctgattcatacattttctcacttccttgcatttctctactctgctgccattgtaaacataagcccatgccatggtacataaacagcagaaattgaatatttggttaacttgttcttttatagcccctatctatgcaaagcacaaaggtagtttttcccaaaaggcaatctgtggcaagatgaaaaaaaagtaagaattctgagctttttcatggagctaagtgcattttatatatataatatgtataaatctgttatgaggttgtaactttatttttgggtttattcttttgtttaaattcttgtagctgtgtttttgccttttaaatttttaattgaagaattaaaagataacaatattaccttagttcccaaaacatctagagagattttactggtccatgaaaaaaaaaatgcttggaaccactgctctggggtaaggcttgacacagctcaaagcagagtctctgtcagtctgaagaatgttttccatgaaagggagagatggcggctagggaggagctaatgtgagctttgaaaacccatcagtaatttccattatcactggataacctgagtgtgggtgtggtgagtggatgagtaatttctaaaaatggaatgaaatcttgtataaaacatgtttcccagaaatctgcacaatctcttttttatacaaatattactctagataaaactagaatctacagtaacacatggttcgtttgttcacccatggttaaatatttaggtagtaaccatctaagggttggaggaaaatagggattgggggaaaatgacttaatcaaatgtggaataaattcaaattacatgtggcctagagagtgaatgcggttcatattgattctctgtatatatctccctaatcttaccatattcccaaggcattgattatagcattaatcacatgcctgtttacacacacagggagaagtgtcaataaatgaaggagagaccagaacttattctgatgtcaatggaaatgcctgtttacctatttgcatataggaaactagtccaggcactctgaaaaagatataacttcagtgttgtggctacagtggaacaatactattagccactgaataaagttccataatataagaaaggaagggctgggacatgaaagttgaaaacaggttttttttttaaatttatacacaaaatattttctattggccaaattcaaaatgtaatgttcctgcttctactaggggtgtatttacccttaacgttctcctatttttaaaaaatccttttggggtttgacgaaaatccaacaaaatgttgctaattcctctacacacaactaaccaaaatgcaatttggtaagagatatttgatgtttaaaagccttttgagtccttaaagtagcaagctatgggggctgtgtcttactcatctttgtatttctggtatctattactccactgtatatgactggcattgaataaatatttgctcaaagaatgaatgaacacaagccaacaaaaaagctaattcaaagtcttgaaatttttatattttcagtgttcaaatgttctctaagggtggtggaatttttttctctatggaaataattttctttagtttctgagtctctaaattttgcttttccgcccccaccctccaaataaccatgctattaaccaccttctcttttgtcacacttaacccctcaccactctatcccagttcctgagcaactgaattgcccaggacaacacctattctgatttaatttaaaaaattctttcttaaaacagttgattctccatgctcagatttttgtagtgaagtagaaatcatatacatatgaaatatatttgttatattattaagaaaagtgaggataaagattatttcttaaccatacactgaatcttattacagataactgatactccaaactgggataataatgataaattggggtgctgattataccatttaatctatttttaggtatccttctttgataattgaatctcttttggccacagatttttgaggctctcagttctaatcatcttatgctacagtacctaatattcataaagagctttatcaacacacgggtgctttcctgcagagatggtacatttttaattggttcttatgtgttgtgttcatcatttcatctttcctctgttctcatctctccagtgttctattatatttaacggtgatttcataaacccatttctttgttgtgctttagggaaagacttacttgtattgtggactcctgattacagagctctgtatctggtactacagagagctgctgtgaaattactattggttggaataccttaggtgtgaagaaagcaatgtggtttggtcaattctcagtggagcttttcattttattggcatttgtctattctattttaataaaccattgggtagatgcaggcagaatgtgccacaaatcaattatatgatccatgtagcagctttagtgggctcaaactgcaaaggacatactttgctgaaattgtatattcaattgctgaggtctacattgactctatttagatctattctatcttttaaaaccctgaaaacactggagcaaactcttttgacgaggacttgttcagaagaagcacacaataaagaatgaaatacggttttctctagaactattgaagtaataatggacagaacaatagtcatattacattatcctttagagtttttaatttaatagaaaattgttctgcccttcagcaagttgtagtatattcattcattaattcttcaaatatttgttttgttcccagtagttgctgagcactatgaaaagtgtgagggtaaaaaaccagctcctttctgtaaactgatttaacagatttggaattattttgttttcatctaaatataaacgttctgtcacaatttctcaaaggatccaattgcttgggagtctaggatgcaaaggactgaaagtgctttccatggtgagtccagagataagctgaaaatcacttttcctcctgaactgggcctcactactacctcttcctgctctgtaggttgacagctggttaatttcctgcagactcgatttttctgcatttcatctcccattccctatttattcttcttgatgacccagaagcatggcattgacatttctttctggttctcattcatgttaaatggactcaatgactttatatctgggccataggattatggcaaaaaagaatgcaggcattttgatcttcaggtctagaaacgaacttccttctacttttaatagtgtgaaaattaaattgaaagtattaaaaaatttaatgttgtgttcctcagaaagacaataatggagaataaaaaacaggtggttttaaaagtcagcttaattgaacctatatacagtaaaatttattttttgtgtgtattgttctatattttgacaacatatacagttgtgtaacagccactagaaataacagagaacatttccaccaccccctaaatttcccttatgccccactgcagttaatcccttcctctcaatcacagcccctgctaacactaatctgttttttgtctctacagttttaccttttccagaaagtcataaacacagactgagtctgacttctttcactgagataatgcttctgagattcatttacattattataaatatttctagtttgttcctttttattactgagtagtttttcatttatggatgtgtaatatttacccacttagcaggtgatgaatatttgggttatttccactattcagcaattattaataaagctgctaatattatttggttataggtttttgtgaggatgcatgtcttcattgttcttgggtaaatctctaagagtggggttgctgggtcacgtggtaagtgcatgtttaactttgtaagaaactgccaaagtatttctcaaagtggctgtgccattttgcattcctaccagtgatatgtgagagttacagttgtttcacatccttgccagcatttgtcatcttcagagtttctgatctgagccgtgactggtttctttcacatagcatgttttcttgtaggcatgtcgtagtatttcatcatggttgtaatttgaactcccttaatgaccattgatggtcattgtctttctgtgtgctcagttgccattcacatctcctcttttttgtgtgtttggtgaaatacacataaaatttgcaattagtgaccggtaaacactaatctgctttctgtctctatggatttgcctatactgcatgtttcatatgaatggaatcattcaagagatgttatctttatgactggcttctttcatataacatgttttcaaggttcattcatgttatagcatgtatcagtacttcatccctttttatggctgaatgatattcccctgtatggatataatatatattgtttatccattcattagttgatagacatttgggatgtttccacttgtggctaaagtgtgttgttgtgaacatttgtgtatgcagttttgtttgaacacatgctttcatttcttttgattatacatctaggagtggaattgctgggtcatattgtaattctatgcttaacttgaggaaccaccaagctgttttccacagtggctgcaccattttacattcccactagcaaagtacaagtgttccatttcttcacatcctctctaacacttattattctgtatcttgtagccatcctaatggtagtgaaatagtatcttattgtgattttgatttgcatttcccaaaggaataatgatttttaccttttcatgtgcttattggccatttgtatttcttctttgggaaaatgtctattcaactcctttgctcattttttaattgggttggtttttttatttttattttttattttttgctgttgtaagagttctttatacattctagatagtagattcttatcagatatgtgactcataaatattttctcccatcctttgggttatcttttcactgttttgataatactttgatgaacaaaagtattgaattttgatgcagtccagtccaaattatcttttcttttgttggttatatttttggtgttgtatctaagaaaccattgccaaatccgaggttatgaagatttaccagtatgttttcttctagaagttttattattttaccttgcatatttaggtttttgatccattttgggtgaattttcgtgtgcagtgtgatgtaagggtccagctcactcttttgtatgtggatatcaagttgttcctgcactatataaggaaaagattattctttctccattgaatgttcttaagaatattgtcataaatcaattgactataggtataggtttatttctgaactttcaattacattccattgatctatgcctgtccttatgtcagtaccacactgtcttgattactgtagttttgcagtaagatttgaaaagagaacgtgtgagtcctctaactttgttctttttttcaagattgttttggctatcagggggtccttgtggttccgtataaattttggctctttcatttctgcaaaggccattgcaattttgatagagcctgaaacgagtctgtagatcactctggttaatactgccatcttaaaaatattacctctttcaatatatgatgtgtttttatttatttaggtctttttaaatgtctttcagcaatgttttgtagttttcagtgtagaattcttataactccatagtaaattcacatctcttctttagtgaagtactcttttaagtcttttgcccattttttagataattgtgctgtttgttttttaaattattgatttgtgagagttctttgcatattctgaatactagccttttactgataaatgcttttacagatatgtcctttgcaacattttctccaagtctgtggctgtcttttcattttcctaatagtgtctttcaaagacactgtttttgattttaattaagctcaatttatcagtttctttctgtatggtttgcgcttttctgtgttctatctaagaaatgttgccaggcatgggtggttcacgcctgtaatcccagcactttgggaggctgagacaggcggatcacttgaggtcaggagtttaagaccagcctggccaagatggtgaaaccccatctctactaaaaatacaaaaaaattagccaggcaccgtggcgtgcgcctgtaatcccagctactcaggagcctgaggcaggagaattgcttgaccccgtgaggtggaggttgcagtgagccaagattgtgccactgtactccagcctgcgcaatagagcaagactccatttcaaaaaaagagaaatgtttactaaatccaaggtcttaaagattttctcttatgttttcatctagcagttttagaatttaaggtgttatgttcaggtctatgatccatttttagttaatttttgtatattctgtgaaacatcaacttttgaatataaagttgtgtcttccaaattctattttgttgttcactagttctttaagaaaaatgttcaataggaacattgatttcctcatttaaagtaaagataatatttacttcctgatctgtcagaacagttgtgaggatcaaatgaaaacaagtatacaagtgttttctaaaatcagagtataaatgttaactatgattatttctagctgacagcagcaaaaaaagaatgatataagaaggtgtcataattgggagaaagccagaactcaaaaaattactgcagtgaagtgaggtgtttaaaagcactagcttttaaataggactgcatttgaatgccagctttgccacttcctagcagctgaaacacacataagatatctgagccctctaatcctcagttttctcatctatgtgatgaggaagggatacaaactccacaaggtggttggagtataaagtgagttaacataaagagcccagtgagctacagtgagtaaggaattaataagttgcattcttgaaagagagagagaaagagagactgtctaataaaatgctgatgtgaattatcatggtatacaaaagtgctacaatacacgatggcaaagaccaagttcaatttcagccaaactgagctactggtcattcctcaagtattctttgcctcttttgcttctgaaaaagtacatgtgttcttggaacactgctccaacatcactaactttacctgtctccctcattttgaaggatttagctcaagtgacatcttcttttaggagctacttcttaccacttcctcccaaagtctgctctgtgctcacatagtatattgtacatagtttttgtatggcaaactgtactatatcaggattatgtgcttattggttacccttgctgattgattatatggaaaactctttaaaggaagggagctgtctttgagtctttagaacccagttcaatgtttgacacatagtggaagctcaacaaatatgtgtttaatgaaaagatgagtatatagtattaatttataatctggatatgactactaaactttttttgtttgttagttttatagcataatactgatgtttacttaaatagaccaagtagatttactctttatgggaaagtgctgaaatagggcctatttcttgcagagcatctatgcctatgtaataacatccaccgtccaattttaagtattaatgctgggggcaagtgaatatatttagtatttgcccagtgccaatgacacagactcctttttaaagttttttataaagtatttgctggtcaaaataattagttattctgaataagtgtgatactgactacatggcagagtaagtcccaagagtatatgagaaaaaaatgacttcattaaattcttatgtgttaaaacatttaatagtttatgtaatatggaattttgcgaaaaggggaaatacctgcctatataaacttcaattaaactgtgagtgtacatcctaattcaatgatcagaatttctcaggtgatgatctcacacatatgtactacctcataataaactgaaacaagtggttagttatgtgctgatgacaaggaggtgggcaattactcaacgcaatgcttatgattgacacctgttaggtttcctgatgttgataaattgggtcatactacagtccacctgtcccaaagggcccattttggttatccgaaggtcactataacttatgatacataggcaagatactcttgtggccataatttcttgttgggaaatgttgactcatggcccaactgtgttaaattatcaaacactggaaaatgtgcaagttagtttaggaatgattggtaagaagctggaaaatctttaagcttaaaaaccaacaacaacaaaccaactggcaagagttccttgtgtccacagggatctatcactttcatcgcaccttgttctgatgttattcaacagtcccttatggtaatgactaagtgtcatagtccctggcattgaattggtcctatccagactatttacttatgtaaaacagagagaagagaaaagagataaactttgaaaagataaaagagtgagaaacaaaagagaaaaagtgggacatgtgggcatgaagagaggtaatcaagaaaagagagcaacgaacacagagctaagctaccaacaaagaaatgaccatcaaagcactgtcacctcatctcctcctcctcttattactactactggtaatattaattgataacttgctttgtactaatgtctgtagtaaatgttttctactgtgttctctcatttcaccttaaccacaagtctaagaggcatgttcagttgttaccatttacagatgaggaccttgagacatagagttatggtccagcctgcccaaaggtttgaaatgactctgcattatgccaaagtccaagatcataattatatcacattattaaaaatccaggaattataaagcacaaatatgggagaaaagtcataggaatagtgacagaataaccaaaagagcttgattttattatggaaaagaactacgaaacaaaacacctaatgtactctaactgataaacacaattgattgttgtctttcaaagtacttatcttagaaggctatgtatttatatccatgacgatgaactggccaatgtctttgaaggttgccagattcaaaattgctattaaaatcagcttactggctacattaaaacagataaacaaatataagccagttgtatttctttagttacctctaaattttttttaattgttaagactgaccatccatttgatttaaatgagttaagtacaaatgactgtggttttaaaaacaataaattgaacctcaagtttcaaagacctgatccaactgatgatatgttgaagaatatgtgtcagactatgaaagagatgcccaattttattgaaataagggtgtagtttgtcgaggtggctgactactttgaagaggacaacaatcttttggatttacaagtttggtatatacatgatatcagccactaccttccagttccaactcatctaaaaggagaaaatgagggtaatagaaaaatgcagggagaggggggaggcaagatggctgactagatgcagccaggtggaatggctcccactgagggaccaagacaactgacatgctcctaatagatcttcagaaggaaggcacccaaagtggactgagggaagacacagaagctgtactaaagaaggagaaagctgggaacactgcatggggctactgcacacctggactcattcctggccacagtggctccaggggaatgggtaagttaaactggcaaggagcaacctgctctcaccataggcctgtggaactctggcaggagaagattccttaatcaccatggaaatcaagttggcagggagagctgcttagagaagaggtaggggcagcaagccagctgatgtggagcccagatggtttggtgcaggaggatcagtagtgaagtacagccagggatggccatgcccctaggcttgacttgctcctaggagactttagctctagaggaactgttggacctgatctccgaaagacaatcttgcccattagatggggctatgctgacctgagcaccagctcaggccatgcctgcttgcagggcagtcccaggtatcctgcggccctacactatagcttctgtactggtggactgtgcctgacgagtgcagagctgcagtagggcagcctctacaaccatgcaccagcctgcccactccttccctgtactacagcttccctcaggcccatggcaactgtccacattgctttgctttgctttgctttgccggtgcatgtctgtatggggtgggttttgcagtccgcccaccctccccctaccaatcaccattgcagacagccttgatgggcacaaaaccagccagccttacctccatcagtgccccacccttgtattaatactgcacagagaacagcagatcttccccttccccttcactcccacttccagtgcaaagagaaggcacccagacctgtgccagccagcaccctgcccccaggccaagaccacttccagtgcgactgtgtacacagtcaccagctgcattacctccaccaatgtggtgaacactcacagggaggcaagcaccctggcatctgctaatactctgctgcagcagccataccttggtcccaccatcacagtgggctgctaaccttgaggagccagagaacaaagttggggcccactacaagtcttgcagagttacagcatgcagaccaggagttgggagctaagtgttggccccctacagtctttcagaaatgaagccagttggtttaatcaaccttatgccacaatcaaactctcaaggtcatcaaataggataaaaggggcaaaaaatccaaaggtcagcaacctcaaagattgaagatagataagctcacaaagatgagaaggaatcagtgcaagaaccctgaaaactcaaaaagccagagtgccttctttcctccaaatgaccacattacctctctagcaagagttctgaactggctgagatggccaaaatgacggaaatagaattcagaatatggataggaatgaagaacactgagcttcatgttgaaacccaatccaaggaagccaaaaataatgataaaacaaggcaagagctgacagacaaaataattggtatagaaaataacataactgacctgaaagagctgaaaaacacattacaagaatttcataatgcaatcactagtattagcagcagaatagaccaagtggaggaaagaatctcggcgcttaaagactggctttctgaaataagatggtcaggcaagaatagagaaaaaagaatgaaaaggagtgaactaaacctccaagaaatatgggattatgtaaagagaccaaatctataaatcattggtgtccctgaaagagatgaaaagaatagaaccaacttggaaaacatatttcaggacattgtccatgagagcctccccatcctagctagagaaaccaacattcaaaatcaggaaatacagagaaccctagtaagatacttcacaagaagatcatccccaagatacataattgtgagattctccaaggtcaaaatgaaaaaaataatgttaaaggcagcaagagaggaaggtcaggtcatctacaaagggaaatctatcagactaacagcggacctctcagcagaaactctacaagccagaaaagattggtggccagtattcaatattcttaaaggaaggaaattccaacccagaatttcatatctggcaaaaccaagcttcataagcttaaagaagaagaagaagaaataagaatctttacagacaagcaaatactgagggaactcgttaccaccagacctgtcttacaagagctcctgtaggaagcactaaatatggaaaggaaagacggttaccagccattacaaaaacacactgaagaccagtgacaccataaagcaaccacataaacaagtctgcaaaataacaagctaacatcatgataacaggatcaagtatacacatatcagtacaaaacttgaatataaatgggctaaatatcccaactaaaagacaaagagtggcaagctggataaaaaaccaaaacccattatgctgtcttcaagagacccatctcacatgcaatgatgcatataggctcaaaataaagggatctaccaaggaaatggaaaagagaagaaagcaggggttgcaatcctagtttcagacaaaacagattttaaaccaacaaagataaaaaaagaagggcattacataatggtaaggggttcaattcaacaagaagatctaactatcctaaatatatatgcacccaatacaggagcacctagatgcataaatcaagttcttagatactttcaaatagacttagactctgacacaataatagtggggatctttaacaccccactgataacattaggcagatgatacagacagaaaattaacaaagatattcagaacttaaactcagcactggatcaaatggagctgatagatatctacagaactgtccaccaaaaacaacagactatacattcttctcattgtcatctggcacacattctaaaattgatcacattataggaagtaaaaaactcctcagcaaatgcaaaagaactgaaatcataacaaacaatctctcagaccacagcacaatcaaattagaaatcaagactaagacattcactcaaaaccatatagttacatgaaaactgaataacctgctcctgaataacatctgggtaaataatgaaataaagacagaaatcaggaatttatttgaaattaatgagaacaacgatacaacatatccaaatctctggaacacagcaaaggcagtgttaagagggaaatttatagtactaaatgtccacctgaaaaagttggaaagatctcaagctaacaattaacaccaaaactaaaataattacagaaccaagagcaaatacataccaaagctagcagagacaagaaatacccaaaatcagtgctgaactgaaagagattgagacacaaaaaaaccattcaaaatatcgatgaattcaggagctgttttctggaaaaaaattaataaaatacacagactgctagctagactaataaagaagaaaagagagaagatccaaataaacacaatacgaaaaaacaagcaggatattaccactgaccctacagaaatacaaacaaccatcagagaatattatgaacacctctatgattattaactagaaaatatacaataaatgaatatattcctggatacatacaccctcccaagactaaaccaggaagaaacggatttcctgaacagaccaataataagctctgaagttgagtcagtaacaagtagcctacgaaccaaaaaaatctcaggaccaaacagattcaccattgaattctatcagatgtacaaagagctggtaccattcctgctgaaactattccaaaaatttgaggagaagggacccctccctaactcattctatgaggtcaacatcatcctgataccaaaacgtagcacagacatgacaaaaaaagaaaacttcaggccaatatccttgaacattgatgcaaaaatcttcaataaaatactggtaaacaaatccagcagcacatcaaaatcttatccaccatgatcaagtaggctttatccctgggatacaaggttagttcaacatatgcaaatcaataaatatgattcatcatgtgaacagaactaaatacaaaaaccacatgattacctcaatagatgcagaaaaggtttttgataaaattcaataccctttcatgtgaaaaactctcgataaactaggtattgaaggaacatacctcaaaataataagagccatccatgacaatccacagccaacatcatactggatgggcaaaagctaggagtattccctttgaaaaccagcaaaagacaagaatgctctctctcaccactcctattcaacataatattggaagtcctggcccacctgggcaatcaggcaagagaaagaaataagggacatccaaataggaagaggaagttgaactaccctgtttgtagatggcatgatcctatatctagaaaacctcactgtcagcccaaatgcttcttaagctaataaacaacttcagcaaagtctcaggatacaaaatcaacgtgcaaaaatcactaaatcactaacattcctatgtaccaacaatagtcaagccaagggccaaatcaggaatgcaatcccattcacaattgccacaaaaagaatgaaacacctaggaacacagctaaccagggaggtggaagatctcttcaaggagaactacaaaacactgctccaagaagacagagatgacacaaacaaatggaaaagcatttcatgctcatggataggaagaatcaatattgttaaaatggcgatgctgcccacagcaatttatagattcaatgctattgctattaaaccaccattaacattcttcaaaaaactagaaaaaactattttaaaatttatatggaaccaaaaaagagcctgaatagccacggcaatcctaagcaaaaggaacaaagctggaggcactgaaacagcatgatattggtacaaaaacagacacatagcccaatggaacagaatagagaactcagaaataaggccacacacctacaactatctgatctttgacaaaaacaagcaatggggaaaggattccctattcaataaatgatgctgggataactggctagccatatgcagaagattgaaactggaccccttccttacaccatatgcaaaaattaactcaaaatgaattaaggacttaagtgaaaaacccaacgctataaacaccctggaagacaacctaggcaatccattctggacataggaagaggcaaagatttcatggcaaagatgccaaaagcaattgcgccaaaagcaattgcaacaaaagcaaaaattgacaaatgagatctatttgaagagctgtgtagcaaaggaaactaacaacagagtgaacagacagcctatagaataagagaaaatttttgcaaactatgcatctgacaaaggtctaatatccagcaactataaggaacttaacaaatttacaaaaaataaaaaaaaaaccccattaacaagtgggcaaaggacaagcacagacacttcaaaagcagacatacatatggccaaaattcagatgaaaaaaaagctgaacatcgctgatcattagagaaatgcaaatcaaaaccacagtgaaatctcacaccagtcagaatggctactattaaaaaataacagatgctggtgaggttgaggagaaaaaggagtgcttacacattgttggtgggattgtaaattagttcaaccattgtggaagacagtgtggcgattccttaaagacctaaaatcacaaatgtcattcaacccagtaatcttattactagatgcatacccaaaggaatataagttgttctattataagatacatgtacacatatgttcattgcagtgctattcacaatagcaaatacatagaatgaacctaaattcccatcaatgatagactggataaagaaaatgtgatacatctacaccatggaacactatgcagttataaaaaagaatgggatcatgtcctttgcaggaaaacatggacgaagctgggggccattctccttagcaaactaatgcgggaacagaaaaccacatatcacatgttctcacttaaaagtgggagctaaatgatgagaacacatggacacatagaggggaacaatacacccaagggcctatcagagggtggagggtatagggtgggagaagggagaggatcaggagaaataatgggtactaggcttaatacccgggtgataaaataatctgtacaacaaacccctatgatacaaatttacccatacaacaaacctgcacgcgtacccctgaacttaaaagttaaaaaataaggaaaagaaaaagaaaatgcatgggaaaaagcaagaaaaaattaaaatatcaatcaccacctgacttttcaatgctgaaattagacactattactcaccagaaattaatctcatgaggggataatgtaaacgtacgggtggtctcaagctcttctgtgtgcacatccacttcccccaccaaacaaaatctgtaagaaaaattctgcccttcagccattgcacatttccccttttctctcttactccttttaactcctagcagtactatgggtaactgaggtaatcagctggaaaaggcctgaaggagccaaatggaaactttgtattgaaaagggcaaagacttccttgtttaagaggtgggaggggaataaaaggatagagtcaaaagtaaagaatgtgaatggaaggttgaagaaaggaaagaaaaaatgacaagccgacatggctaattgtcagagaaagtttctgtgggttattaagagagcaaagagaggattcgagggagttttcgttaagagggccatgcaaggaatgagaagagagctttccaaaagagttgttgtgaatgatacattttggaaattctttaaagttctataagagataccagtaaagattggagttattttaaatactgtttgcggccaggtgtggtgctcatacttataatcctagcattttgggaggccaaggcaggcagatcgcttgagtcctggagttcaagaccagcctcagcaacatgatgaaacctcacctctacaaaaaaatacaaaaaattagccgcagatggggtggagtgtgcctgtagccccagctacttgggggctgaggaggattgcttgagccggggaagtcgaggctgcagtgaactgaggtcataaccactgcactccagcctgggtgataaagcgagaccctgtctcaaaaaatgtatgcgtaaataaatactttttgattgctggattatatctttttgactgcaacaatatgccaagactgggccacgagagactcttgatttattcaggtaatagcggtataacatttacagcaggtgttcctaacactggattcatggaaggaatttaggttgccaataaatcctgataattgtgtgtactttttgtgtttatgtgtacatgtattttttttaataaagagaatgtttatgtttatagctttcattagatcctttaaaaattcatgatccttctctttaaacaactgaaagaggcttatgactgtaatcctagcattttgggaggccaaagcaggaggatcacttcaggccaggagtttgagaccagcctgggcaacatagcaagaccccgtgactacaaacattttaaaaaattaaccgggaacagtagtgtgcacctgtaatcccagctactcaggaggctgaggtgagaggatcacttgagctcagaagtttgaggcaggctgctgtagtcagctctgatcatgcactgcactccagcctgggtgacagatttagagcctacctctgccaaaaaaaaaaaaaaaaaaaaaaaaaagaaagaaaaggaagagaaaaggtacaagctcagggcaaaatattgagttattaagtgaagatatataactacagaagataactgatttctaattgtactgtacaagcttactatgctagtccacatccatttatttttccaaagatattgaatatcaatgtattcattcatttcctgcccctaagttcctctcctgatttccttggtatctgaatgtacatttggagattaaaaaataaagtaatcatgagagtgctacataaggtaaggaaaagggccactcacattttctggaattgaagaaagagggggaaaattagagctaaacctgaatgcaaatcagaaatttactatagtttgagaagggcatcatgatagacactgaaacaaaggaaagcacagcataaaataatggtcagagtattacggttatcaaactgattaaatgtcccctgtcaaggtacatggaaagacattttcagtaattctgcttctagtgaaagaaagagttaatatatcatacttgttacagaaaccttaattcaatgcataacagactaagcatcaagttatattaactggctaaacatttaaattatggaaggcaaatagctgcaaaagggaggaactgagaaccacaaaaagtctgccattgcttttctgtttgtttgaaccacctactcaagtgctttattcaaattaaaaatgggatgcacagaaacagctcccaagtctttcaaaaaacgccttctttcttcacctgcctctttcctcatttaagagtagcacccacaagaatgcaccattagcttgccctagacaaacttcaatttagagtcttaggagaaggccgtcagcaaatattagtctctagggtttcctgagcagagtactagccatattgtaggcattcattaaacgcttattgaataaatgagttaccaaatgaaaaaatgaaaaaacattttttaccccactgttgcaattgtggatatggatatgcgacattaggaacagcactaggcttgggagagcaacaccagggaaatcagaaactgtccccacacaaaatactcctcttatctcttgcagatagcaggtgttcccttagggaggcttgagccttacatggctgatgctctctccagaggttttatgaggaagaaggaaacaatgcctcatcaaggggatccatcaagggatttgggagaaaggagggtgtggcaggcagaagtaatgcccctaccacagacatccatgtcttaatccctggaacctacaaatatgttacgtcaatggaaaggaagattttaggttgcagatggattaaaattatgagtgagctgaagctgagatgggataagtatcttggaccacacaggtgggcccaatgtcatcacaagggtgaggcagaagaaaaggtcagagtggaagaaggatttgacctgctgttgctggctttgaagatgggaggggtctcaagctgaggaatgtgggcagcttctagaagatgacaaaggcaagaaaatggattctctcctagggcctctagaaagaaatgcagcctgaccacacctggattttattccagtgagacccattttcgactctgacctccaggactgtaagataataaatttgtgttgtttcccactaccaagtttttgagaatttgttacaacaacaataggaaatataaggtgggtgaagaggatggaaggacttgagaggcaggtagactggttttgtcattattagctgtggggattgaaggaagttatttcatctctgtgaggcttcgtgtgctcatcactatagagagttaaaactaacaaactcataagactgcttttaaaacatatatatttaaaataatctatttagggcttatctttaccactagatacatttttaatttgaattttttctatttttaaattgacttcacttttttttttcagaacagttttaggttcatagcaaaactgagaggaagttatagagatttccaatatgccccctaccctcccacatttctaccataaatgacaatgttatgttctgtaaaatggtcctcaagttactgtgagaagtatatgaatagtggaatatgcaaacttctaagtctggatgataacttactccctttcaggttttgcagccaatgtagacttcatgacttcagagtcgtaaatatagtgagataatttcaacatccaaattgtaacaaaatcattgctagggtttggaggtacattgtgttcaaagatttttattaaattttgtgatattgcacaactttgattagaccattttgtggttaggacaaatctatttttattaacacatcaaattttaagaaataagtagattttaaatccactttttcagtttattaataaattacgagaaaggcacaagaggaaacctcataaacgaatgtttcttttaaagaagtatttataaatcacaaagtgacttgatgtgtaatatatctagcttcaaagtatatcaacaagattatttccctgttttctttttcaagccaacttaaaattgagttcaatatcacttaaagataatagctatttagatttttcaatgcttttaaaaggaaaaagtaaagtcttctaaagtgaccatgacatgcttaagtaaatatttttccccaaagattcactgtgtaatttgacttgagaagatatgagtaaaacatagacctgctacaatattttaggaaataatttactatttcctctgattttggaaagccctttaaaatatacaaaatcaactgcaatttcccacaacaccactttttctacaggcttcacagcttggataaccaatagggctgataaatcagttcgtcaacaagctcagaaatcccaggaaaaaaatggacaactcactgctttttctcctgtatctgccctttgcttcgttgtcccctaaatgacttcactactgagtttacggatcaaaagactttttctatgaatactcacttccattgaaatatgcagaaattttcagaaaaagtcaacatttacttagtataaggagctttaagtttgaactagtagagtgatcagcaggtttaatttaaccctgaaaaacagctcaactagctgtcctatgcaggtacttatctctctcccccagagagctcagctggcagcagtcaaaaccaaagtggaaacttaataaaaatgaaaattgtggtagcaaaatacacttacaaggttaatttgacatattgcaaaatcttgggaagttatagtggtttctaaatatccacagtactgatctagaaaaaccccaaagaaacagctgcatttggagatataacctgccttatctgaagagaagacctcggaatatcaaggtttgtaagtcttgagatgcttgaatttgaagacaacattggtggaaattctatgcacttcttgttgagaaacagcaggaccataaaacccatagaagttatatttatgtgttgggcaaacacatatttgctccaaggatcacatagttaatttatttcactagagagtgcaaaggataaagaagtaacatcagttctgtgagcctgttaagaaaattgttgtgcttagaccactggattctttgattacctgtgaatgtctccatttttggcatttggtagcaattggctgaggcaaacccggcaaaatgttttccagctgctggaagactaactcttgcacatcctcaatgctgtgttccaagtatgtaactccaaatgggacagtggtgtgaatcacgagggaaggcccaatttctgatgactctgtggcataagaggatcataaagatgcatcttaaagtgggtagcaggcaagcatctctcaggatttcaattcagacttaagaactgatcacaataatcaagcaataaatggaggaaaaacttattctaatctctaaagcataaattaggcatttctgaaattcaaaatcaaacttctctgaagaggaagacagattaaagagaagttttagtgaaaaattgtcagatattgctaaagaactggaagaaagggtagaagtgcatttaatatgaactgccttggatataattatatttaggtttgtcttctctcattcacaaaattgctagctcttcagggcagggtccattttttttatacagagtctatattcttcataaattctgagaacaaagtatatattcaataaatacctgtctcattcaattaatgcttaatgggttgaaatatattttgttgaaattacacaaatgtcagaacaaaaagaaaccaagctcctctctgaaaacaggcttgtcctcataatattcttctctatgttttaattaccatttctttatgttttaatcagcattaaaaataaaagtctgtctcattcaaaacatgaaacaactttccatttttgtttgccattgatttttttgctgtctgttcgtaatcacaaataatgaatatctgctttgtatcattcactccttagtagaataaagagcaatcaaagtctgagttgaaagaaacctaagtaactgactctttagaaagcaccatcttggaagaatgttaacaagaatttgtctgctattatttgtttgaatcatgcagaagagaaagctgaggggaaaacaatgatagatgtgaaacatatgaatataatatgaaaattggaacctccccctcctgagagaagagaatattaaagtgtataaggcactgataggagatgtcaaacctgattctggaaattctttaacttgggattgtaaatggtaatacaatgatctatttgagttacagcagtacaactgacacaggaaagaaagagttgacataagccacttactcactatgtgcccgcttaacctctttacatttcaggtttttttttttttttaatgagaataagttagtagccaccactttttttttttaatgagaataagttagtagccaccacataggtctatgatgtgcattaaataacatagtacacatgaaatactcagcacagtttctgacacagaataggtgcttaataaatctaagctatgggaatggaagcaataagccagagacacgcgtaaagcttcctcagtgttgcctaaattataggtgtgagtcatgttttgtgaaagtacttcatttttcctttgcactcagcacaaggaaccctggtttatgaattttatggcaaaacacaagagaagagagtcccaacatgctgcaaactttttaaagtgaagtgaatgcttccaaggagtttcacatatacgaggtgagggacctgaattcagaatttgtgcagtaaatgcaatggtaagctgggctgtacagtattttcacctcacagtagctggaacaacttgaaagaggaaatagaggggccatctctttgaatgttcaatgtgtaacctgtcagtgaagactttacaggttctgtacagagggaaggactcaggagtggaaaatctcaatttctttcacagaataccaccacagtgagaaatctattgcatattgccttaggaagttttatttatgttatcagttaataaactcagggaggcttgttcacagtgacggggtatcaatgccacccctcttccatacagtaccacatcttcccagcaacagagaaaactactaggtcagcattctgaagcagggaagttggggctctgagttgacttatctatgtcaggcttcaaaggaaaatgaatgctagctgcatgctgagaattgggaggttgcactgacccagctatttgttccaggggaaactcgtaaagtcactaagaccagtgatggtgtgatgccaggtttctcccatttacattaaccatccactccacggagagcaataaaacatgaaatttaagacctaaagtgaaatagttctcgcataacaatgagagaacaacctgcctacttatttttatttgaattgtacatttattttgaaaatttagatgaaaatttgaatagctatgactgaaaacagtaagttttggggaaaagctcccccaaccctaaatcagagtgtgttttcagaagctaaagtctaaaaatacaaagagtcaagcagaatttaaacgtgatcaaagtttgaaaatagagcagtataaaaagccacaaatatgttaataggatctagagcataaattcagcataatcattattccttggtcacggggaagttaatgatgctatttttctttttcttttctttattcagtttaacaagaatatcacctagcttttggcattttaaatgtaaagctcacagtaagttgacaattatttctctactttgggaaatcaatggctatagagtcagaagataagtatttgaacctctgcatcctttaatagccctgtaatcttggacaacttaatctctcaggcttcacttttttccatcaattaaaagggagcaacactactgaccttacaaggctgccatgaggattaaatgaattactcacataaaagccttccttcaaacataaagtgctacacaaacagaaggcattcctaggtaatattcttgtttccacctctccactgttgaaagagcagctttagaaagggataacagaattgacttctctcaaagcattaagactgatcattacatcaacaccccagcgacaatggaagactattcctgggtataggcagagcaggatttgatttttttgtgtgtgtttcgtaaaatatacataaaatttactgttttaacctattttacatatacagttcagtagcattgagtatgttcactttgttctataacagtcaccatcaagctgctggttttcaagatgcctgtctagtgacatcagatgccagctcttttcagaaagatcaaagttatctgtgaatggacaagttccaaatgcaaaacttacagaagagatccaggacctgacagagtgcccaggggaaaaagctgagatgcagaaaaaaaaagcagcaagggtctggcagagattgacccctgaggaactcagaaccctgtgctaaggggtagtgggtgtgcttctctgctcccttcacccctgcaacaattcactgactgtcaaactgttggggagcccctctgccctctggatcacgggcaatgctgtcagtggtgacttgggggaattttccaggggcaaagaaccaggtggccagctcatgttaagcatgcctacactcccctcagacctgaactgacatggctgaactgagccatgctggttgtgcacctgtggtgggacactgccctgcccagggaatctctgcccttgagtcaccacaccacgagattccccacaaacataccccacaacccattctgtctctggcaaacatggggctgttgggtccctgtggagctgtgggagccctggagatctcacccttggtgggctgccctgaaggcaatggggagcacagcccactaaagtctcccttgggacaaaggaaatgaaggaagtggcaccaatcggtgaagggggtagcactgatggctaggaagggttgtggagagggagtcatccaccccttgccacctttagccactgttgaggatgcagtagtggttcttctggctgggggctggtatatgtgcacctggagaaagcacttatcacactttttgtagtgaatccacactcgctgaaagtgagcccatgctgcttgggcttgcacaaagggcagggcccaactccctgaccctacacaaaacagcagcatcctggcaatggaggacacagacaagccacagagttgtctgctctggactgggggaaggggctctgccccaagaccatcttggtggtagctgccaaaatggtatatcagtagcccatagccacattgcagctgggaaccaaaggaaaaagtctttatgaactgaaggctgggagccctgtgacatggtgtgataggggaagcagctggcattcctgcctggtcaggatgaggagctggtgcacttccccaactgctccttccccaaagacctcagcatgctccaacaaaatctcctcccctctatatcagggcaggtgcttccgctcatcatcaatctacctgtgggtgggccagctcttactcttaagtgccacctactggactagagcttgaactccaccaccaaataaaacacctgctgccagaagggctgagtgctagtgtatgtgatgagacttccataccctcagccaagcagtagatagagtgttagctcatatgtcaaatatattgctacaacaagcagcatccgagaaagccaccacacaaaagctacccacaatgaaggacccatacagcaccttggtcctctgaaagcacctggaaaggaggccaaatgatcatacacaacatacaacataccctcaagataaaaaagaattacaaaatgtaaaagtcctatcaaaaggacagaaaattaaaaaataaacgtgacagatccctcatatgagaaggaatcagtgcaagaactctagtagcaaaaaaaaacctagagtggattgacacctccaaagtatttcatttgctctgtagcaataggtcctaacaaaaatgaaaagtctgaaatggcagacaaataattcaaaatatggattttaaggaaactcaatgagatccaagagaaagttgaaatccaatacaaagaaaccagaaaaacaattcaggctataaaagatgagacagctatgtcaaaaaaagaaaaaaaacccaaacaattagaacttctggaatgaaaaaattcatggaaagaatttcaaaatacagttggaagctttaacaataacctagacaagcagaagaaagaatttcagagcttgaaatgtggtctttcaaattaatccagtcagacaaaaataaaaaagaatttagaaaaatgaagaaagcctttgaaaaatatgggattatgtaaagtgaacaaacatacaactggttggtattcctgagagagaagaagaaaaagaaagcaacctggaaaacatattggagacagtaattcaggaaaatcttactaaccttgctagaatcatcaacatccagatataagaaatttagaaaactctcgcaagatactacagaagatgatagtcaccaaggcctataattatcagactatccaaggtcaacatgaaaaaaaaattctcaaagggaggcacctgaaaaaaagggataaattacccataaaggaaataccattagactaacagtggacttctctgtagaagccttacaagcaagaagagattgggggtatatttttaactctctaaaggaaaaaaaaaaaaagtcagccaagaattttataccctgccaaactacacctcataaatgaaggacaaataaagttttcccagatgagcaaatgctaagggaactcttctttaccagaccagtcctacaagaaaagctcaaagaagttctaaacatgaaaacaaaagaacaatgcttgctaccataaaagtacacataaggccaaagtacacggatcctataaagcaattacacaattgagaatacaaagtaactagctaacaacactatggcaggaacaaaacctcacatatcaatattaaccttgaacataacagcataaaagccccacctgagaaacacagattggcaaactagattaaaaaaaacaagacccaaccatctactgttttcaagagaccaatgtcacacattatgacagccacagtctcaaaacaacagaatggagaaagatctatcacacaaatggaaaacaaaaaagagtaagggttgctattcctgtgtgagatagaagagactttaaaacaaacacattaaaaaaaaaagacaaagaagggtattatataatgataaagggttcaattcaatcagaaaattctactattttaaatgtatgtttactcaacatcggagcaccaagatttagaaaacaaatactactagacctaaagagaagagatagacagccttacaataatagtagggggtttcaacaccatgctgacggcactagatagaacactgaggcagaaaacaacaaagaaaatctggacttaaattggactcttgaccaaatggacccagtaaacaccacagaacactgcatccaacaaccacagaatgtatgtttttctcatctgtgcacagaacagtctctaaaattgactatatgattggccatatagcaaatcttaatacatttaaaaacatcaaaatcatatcaagcatcttctcagaccacagtggaataaaatcaggaatcataccaagaggaactatcaaaaaccacataagaacatggaaaccaaacaaacaacttgctgctgaatgacttttgggtaaacaaaagaattaaagcacaaatcaaaatatgttttgaaacaagtgaaaatagaaacaaaatatccaaatccctgggatacagcaaaagcagggctaagaggaaagtttattctgctaaatgtttacatcaaaaagatagaaagatctcagattaacaacccaatgtcacatctaaaagaactagaaaaatgagaacaaaccaaacccaaagatagaagaacaaaagaattaacaaagatcagagcagaatgacataaaattgtgaccaacaaaatatactaaagatcaacgaaatgaaaagttggttctctgaaaggatgaacaacattgatagaccagtagctacattaaccaagaaaaagaatattcaaataagcataatcaaaaaatgacaagggtgacattacaactgatactgcataaatacaaaagattctcagaagctattatgaatatctctatgcacaccacctagaaaacctagaggagatggataaattcctggaaacacacaacttcacaagattgaatcaagatgaaattaaaatgctgaacagaccaataatgagctagaaaattgaattagtaacaaaaaatctacaaaccaaaaaagaaaaacaaaaattcaggactagacagactcatggccaaattctaccagacttacaaagaagctggtaccaatctcaatgaaacgattccaaaacactgaggcggaggcattcttccccaactcattctatgaaaccagtatcatccaaaatctggcaaggacacaatcaaggaagaaaactataggccaatatccctgatgtacacagacacaaacattcttaatgaaatgctagcaaattgaatctagctgcacatcaaaaagatatttcatcgtgatcaagtgggttttatttctggtatgccaggatggttcagcatacacaaatcaaggtgattcaccacataaacaaaaaccatattattatctcaataaatgcaaaaaatgcattcaataaaatccaacatcctttcacaataaaaaccctccaacgaactaggcatcaaaggaacttaactaaaaataataagagccatacatggcaaacccacagccaacatcatactgaatggtgaaaaattgaaagcatttccccgatatggtttgggctctgtgtccccaaccaaatctaatctcaaattgtaatccccatgtgtcgggggttgggggtgattaggtcatgggggcagttttccccatgctgttctcatgacagtgagttctcacaagatctgatggtatttaaagtgtttgacggttcctccttcacaggtgctctctcatgtgctgccatgtaagaagtgcctgcttccccttctgccatgattataagtttcctggggccttcccagccatgcagaactgttagtcaattaaacttctttactttataaattatctctggcagttctttatagcagtgtaaaaatggactaatacactccctaggaatgggagcaagacaaggatgtctactctcatttctcctattcaacatattactggaagtcctagtcagagcaattaggtgtgaagaagatataaaagtaatacaaataggaaaagaagaagtagaattatctctgctagctgatgacatgatcctatacctagaaagcctaatgactgctccaaaggactcctagacctgataaatgacttcagtacagtttcaggatacaaaaataatgcacaaaaaaatcagttgcattcctatacaccagcaacactcaagctgagaaccaaatcaaacactcaatcccacttacatttgccacaaaaaatactatatctaaaaatgcatttaactaataaggtaaaagatctatacaaggagaacaacagaatactgatgaaagaacacatagatgacacaaacaaattggaaaacatcccatgctcatacagaggaagaatcaagattgttaaaatgattatactgcccaaagcaatctacagattcagtgaagttcctaccaaattacctacatcatttttcacagaattagaaaaaaacaattctaattagccaaagcaatcctaagcaaagagaacaaggctggaggcatcacattacccaaactcaaagtatactacaaggctacagtatccaaaacagcatggtattggtacaaaaacagacaaagatcaatggaacagaatacggaacacagaaataaatccatatacctacaactaactgatattgacaaagtcaataaaaacaaacaatgaagaaagtacaccctattcagtaaattatgtgggggaaaactggctagggatacgcagtagaatgaaactggaacaccacctttcaccacagacaaaaattaagtcaagatagattaaatacttaaatgtaagacctgcaactataaaaatactagaagaaaacctaggaaaaactactttggacgttggcatattcaaagaatatatgactaagacctcaagagcaaatgtaacaaaaacaaaaacagacaaatgggatttaattaaactaattaacagagtaaatagacaatttacagaatgggagacaatatccacaaactgtgcatctgacaaaggtctaatatccagaatctataaggagcttatacaaatcaacaagaaaaacaaaacaaaacaaccccattaaaaagtggggcaaggtcatgaacagatacttctcaaaagaagacatacaagcaaccaacaaacatatggataaatgttcaacatcactaatcatcagagaaatgcaaatcaaaatcgcaatgagttaccatctcacaccagtcagcatggctattattaaaaagtcaaaaaacaatagatgctggcaaggctgcagagaaaaggaacgcttatacactgttggtgggaacgtaaattagtttaacccctacggaaaacggtatggagatttcacaaggaactaaaaatagaactaccattctactcagcaatcccactactgggtatctacccaaaggaaaaaaaaatcattttatcaagaagacacctgcacacgtacgttcactgcagcactattcataatagcaaagtcagggaatcaagctaagtgtccatcaattgtgaactggataaagaaaatgtggtatacatacaccacagaatactatgcagccataaaaaacgaaattgtgtcctttgcaaaaaaaaaaaaaaaactaaaacagaagatcaaataccccatattttcacttataagtaagagctaatcaatgggtacacatgatataaagatggaaagaatgggatatgcattctagacactgggcactccagaaagggtaaggatgggagtggggagagagttgaaaaattccctattgggtactatgttcaatatttgggtaatgggtttactagaagcccaaacgccagcattacacaatatacgcatgtaacaaatctgcacaggtgccacctgaatttattttttaaaagccaacaatgaccactatccatctcctaaactttttcatcttcctaaactgaaactccatatcccttaaacaataagtaactattctcccttccccagccctggcaactaccattctatttctgtctgtattaatttgactactctaggcacctcgtataaatggagtcatacagtatttgtccttttgtaactggtttatttcacttagcatgatgtcctcaaagttcatatattttgtagtaggtcagggtttccttccttcttaaggccaaatgatattccaccatatgtatatgtcacaatttgcttatccattcacccttcaatggacgcttgagttgcttctaccttttagctattgtaaatgatgctgctatgaacattgctgtacaaattcagttcaagtccctgctttcacttcttttgggtagatactcagaagtggaattgctggatcatatgggaaatctatctttaattttttgataaccacatcattttccataggctgtaccatttgcattcccaccagaaatgcacaagggttccaatttctccacatcctcaccaatacttatttgctgtttgttctgtttttgtttttaataatagccatcctaatgagtgtgaaatagccacagcagtttttagtctacaattttgagtgaaggtcaggacaccgaatgttgataaaaacagcagcaaccccagcagtagcagcagcattataatcatcagctgctaatagagcactaagatttagaaggctcaagcattaaatacttacaatcaaaagctacagaagttgccgactctccaaacagaaattaacatttgttttgaagtaagcactgtagctgcctcagattcatggtcatgacagttgtaaccattaataggttaaatgtacttatttaaagaaaaagattgtcataatgggtcacatccaactacatgctgcttatcataacacgcatttttaaaaataaattctatctcaattgtgttggtctctctatgattgacatggtttggctgtgtcctcacccaaatctcatcttgaattgtaatccctataatcctcatgtgtctagggagagaactggtgtgaggtgattggatcatagggttggtttcccttcatgctgttcttgtaatagtgagtgacttctcatgagatctgatggttttgtaagaggttctccccacttcgctcctcactcttttctctgtcctgccgccatgtgagaaggcccaagcttgcttcctctttgccttccgccatgattgtaaattccttgaggcctccccagccatgcaaaactgtaagtcaattaaacctcttttctttataagttacccagtcttgggtatgtcttcatagctgtgtgaaaacagactaatacagtaaattggtacctcagagagtggggtattgatacaaaaatacctgaaaatgtggaagagaatttgcagttgggtaacaggcagaggttggaacagtttagagggctcagaagaagacaggaagatgtggggaagtttggaacttcctagagacttgttgaatggttttgaccaaaattctgatagtgatacagacaataaagtccaggatgaggtgatctcagatggagatgaggaacttattgggaactagagcgaaggtcactcttgccatgctttagcaaagagactagtggcattttgtccctgccctagagatgtgtggaactttgaacttgagagagatgacttaaggcatctggtggaagaaatttgtaagcagcaaagtgttcaagatgtggtctgtgtgctcttaaaagcattcagttttatgcattcacaaatagatgatttgaaattggaacttatgtttaaaagggatacagagcataaaagtggaaaatttgcagcctgatgatgcgatagaaaacaacccattttctggggagaaactcaagctagctggagctgtgagaagagggccaccatcttctagatcccagaatggtagatccaatggcagcttgcaccatgcagctggaaaagctgcagacactcaatgccagcctgtgaaagcagctgggaggagggctgtatcttgcaaaaccacaagggtagagctgcccaagactgtgtgagtccacctcttgcatcagtgtgacctggatgtgagacatggagtcaaaggagatcatttcagagctttaagattgaatagctgccctgctgggttttagacttgcatggggactgtaacccctttattttggccaatttctcccatttggaatgggagcatttatccaatgcctatacccccattgtatctaggaagtaactaacctgcttttaattttacaggctcgtaggtggaagggacttgccttttctcagatgaaactttggacttggacatttgggtttatgctggaatgagttagttaggactttggcagactgttggaaaggcatgattgtgttttgaaatgtgaggacatgagatttgggaggggccagggatggaatgatataatttggctgtgtctccacccaaatctcatcttgaattgtaatccctataatacccatgtgtctaggagagactgatgtgaggtgattggatcatgggggtggtttcccctacactgtttttgtgaaagtgagtgagttctcatgagatctgatggttttataaggggctcttcccccttcactcctcactcttctctctcctgctgccacatgagaaaggtctaaggttgcttcccctttgccttctgccatgattataagtttcctgaggcctccccagccatgcagaactgtgagtcaattaaacctctgttctttataaattatctagtctcagggaagttcattatagcagagtgaaaatagactaaggcaatgctactttaagatttgttgattggcctcatatatagtcagttcttataagtgttttatgtgtacttgaatagaattttctaggtattgaattgacattttgtatgtatgtatgtatgtacgtatgtatgtatttttgtattttagtagagacggagtttcaccatgttgcccaggctggtctcaaactcctgagctcaggcaatctgcccgcctcggcctcccaaagtgctaggattataggcgtgagccactgcgcccagccaatttatttatttatttttaatttgagatagagtcttgctctgtcacccaggctagagtgcagtggcacaatcttggctcactgcaacctctgcctcccaggttcaagtgattcttgtgcctcgcatcctgagtggctgagactacaggcgtgcaccaccatacccagctaatttttgtatttttagtagagacagggtttcgccatgttggccaggctggtctcaaattcctggcctcatgtgatctgcccagttcagcctcccaaagtgctgggattataggcagaagccaccgtgcctggcctgaattaacattttacaaaagttaattagaacaatctcattgattgtatagttctcatgaattgcattatgattttttttgtccacttcagttattgaaagaagtatctctcctgatgatggtaaatttgccaatttctgctttcagtcttgacaatttttgctttatatctaagttaggttaatagtttcctgatgtttgaatattttaacaatacattgtgaacctctttacaactagatgtgctttttaaggggtattttttctttgtatttgtcccacttattcagcatgcatgtttgcacgtttcttttttaaattcaaaaaagtcttctttttgattaaaccatgtttacattttattccattttccccttctactatcttggaaattatatagttatatttttagcgaatactgatatatttaagcatacatattaaattaaaattgaaagtgaacaaatacctttatccttctcctaaataatactagagccttagattactaactctaagtttatatgcttttattgttcaggattattttatttctttggttctatcttatacagttaatgtttgtttttattcatgaaaagcgtctttcttggatctcagattctccctctaggctcattttcctcttccaaaagtattctgtgaagttcttaaaatgaacttctaatggagatagaactctctcagattttgctttccttaaaatgtctttattttatctgcatttgtgaaatataatttttcttggtatataataataaattgaaaatatttttctcaagactttaaagatatgataccaatgtagtttagcttcttttgagactgttaggaagtcaagtgttttttgtttttctttttttttttttgctctctcacccaggtttgaagtacagtggtgcaatcatagctcactacagccttgaactctcagactcaagcaatcctcctgcctcagcttcccaggtagctaagaccaccacacccagctagttttttattttttatagagacagggtcttgctatgttgcccaggtggtcttgaactcctggcctcaaacgatcctcctgccttagcttcccaaagtgctgggatgtaagtgtgagccaccatgtccagcctgagaggtctttcttaatttggctgtaggtcctttgcagttaatttttcttttatatctagctgcttttatggttttttctttgtctttgatgttgtgcagttttattcagttattttaagatttgaggttttttttggtttacctttgttgacttcattgggatttctgaatctgaagacttaattttgtaattaattttggaaattgttcagctattagttctcccaatatttccttattcccattctctctaacctcttttcatgaaattctaattagggatatactagatattctcattctatcttcacatattttgatctattttcagtattttctatctctatctctccatgctaaattctgtgtaattttttgtgatttatcttttagttcaccattctccttacatctgtggtttttttgatgttcaatttgtcctttgagtttcaaatttaaattattttatttttcatttgtaaacgttctatttggctctttttcaaatctgcatgatcaattttgatagtctctttctccctagtcatactgtcagtactcttatttcttccaacatattcaacatagttattctatattgtgtgtctggttattccaaaattttcaggctttataaggttggctctggctttttttgttgttgttcttgttggacgactattgctcataattgcatggttttctgtctgttttgagatatatatatatatatatataaatataaatatatatacacacactatatatatacacacacacacaattttatattatctctctctatatatatttctttatatatgtttatttataatacatatatatttctattgtgagctcatgctcctaggaactttatctgaaagattctttgtgcctgcatttaaataatgttcctttggaaacgtgctttggtttctgccagaggccttagggcaatattgcccatgaccactttaactagatttatacaatatgctggcagaatgaattctggcaccaaatctgcttaagggtgggtttgtggtttggcatctcagtaagacattttgttaagtaacttcctcaaaatgagatagaatatctctcttaagctgatggtttatagcatatcttataattaaataatataggctttttaaataaaatcagaaactaaaattcttagtaacaccaatagtatttaacattgctctggttggtacaataagataaaaaatggaaaaaagatgtataattattagaaagaaggaaaacatggttgaaaacagtagtgaatccaataaacttgatcaagttgaaatatttttacataaaattgatttccttatatatcagtgataactagtaagaaaaatgatttttaattaattatgcaacatcctttacaatttgacaaaatgacgctaaaggtaaaatacaataataatatttaaaattttttgtaaagaaattcaatgagtagagacttgctttgtcatatatttaaatacattataaagctacagtaattaaaataggctggtactatttaataataatgatgaaccagaatagttatctctgaaaaaaatcctaaaccatattaagtattataacagaaacttaacaaagcactggggaacaaatgcattttaatattggctagaaaattggatataaggaaaaaattaacttaggtattctttttccacttctgagacacatttctcacccatttctaattttctacttctgtagccatatgaagaatgtaccttcttaggtatacagcatctctgctcctaggtttgctctcacaactttatattaaaagttcaaactccctgggacacccttattcacatgcaaacacatcagagactttttccatctgaaaaattaaatttttggcagtgtgtatcaagggtcagaggttgcgttcccaaaggccagctctaaattatatctctgacagggaaatagaggactaaagaaatttaaggagtggaagactttaatgttagagaccaagaccaaaaagaaatgggtgaaatatttcttcaattattgattcagtcaaatgagcatcctggtgtctggcatttgttgccatgagacacagtattaaggtctttcaagagtttacatcttactgggggaaatgaaacacatgcaaagtaataacagaatcattatccactaaacggtatactattgatgtgtgtgcaaatgaacgttctaagtaaaggggaggacttagttcagaaaacagattcacatgaggagagaagttggacaaggagctgggggccacactgttttaggggtggtggtctgctctcctttctcatggcggtggaggttgatgatacgtttgcccttctccagtccatttggaactggctggctcaactgccctctagccacgagagttactacaatttagctcttttatatggctcccaggctcagcagcacctgtaatgaagagcaagccaatcatatcagtaagtccaacaaaaaaaatctaactttccctggatgataaaagatagccagggagagagaggggagaaagatgggaaagggaggctgagagagaagtaaacatgctcctgatgtctctctctcctctttcttgccttgctagcagaaccaagccaaaggagcacaaagtactctctgccttttggcattctacctccttggctgcgtgtctactgctggtcccaggtcaagaactaggcctcactattcagagggaccacctgcagattttacttgctttttaaaaatctcagatctagttcttatatataggttacagcagccaaaattcagctatgataacactcctcaccaaatatgtcctgggcaactttgttacctccaactttatctacggcagggacttttgtagtatttataatcattcaacacaattttacagttttaattgaagagtaaagttctggaagtaaatacttctgaaatgatggcatgggccatgcggagaaaagatggttttactcacagtccttccctttacatatttcactcttatactgtcatctttgaggaaaagtacttgttttactttcttccatattatgtccctggaggtagggggctatattaattgataaaagcagttgtttacatatctagttaaaaccgttgaagaggtttgaattaacagcctcatttgggagacttaaggattataagatctaaagaagtgataggagaaggtaattggcctggaaaagattcagaaagataaatgaatgtggaaattgtattcttgtcagcagacaccaaaattgcctgacaaacccttacttccctttttacaggttaactatctattttaaaagggggaaatgatagaggtgaaatgacacccttctaaatgtcaggaaatataattcaagtaaaaaagtgtgtggtttttttctcctcttcctgctgagggttatacctacctcttcctaggaaactatgatgtaccatttaagatttatagaaaattctggagtaatgtttttacccctaagaaacaagatatgattcatttagcataagcaactcaggtctctttctccatcctgattgtacacttttgaggaatatcaattgagcttcagatcttgagtctgaaattctgtctccctactccctgcctgtatgactttaggctgcttgttgttttgtaatttcttaagtcagtgcctcccacaggaaccatgacatattaatagttattaggcaaaacaacaacaaaattctttggacgaatatatttttgaaatgcctggcttaaataaaattaagtggaacttctcggtccctgatatggttatgtacagtgtaaatctttaatggaaagatattattaaattatttttggtgttttaaaactacttttatctgaattacaaaactttttaaaaagttattcaaacatgatgaaagtgtataaagtgaaaaaataaaagtactgctttggtatcagaactggcagccccattctccagggtaactactgtcagtggtttcttaatacccttcctgaaattttctacaaatgagcccgcatatttacttcccgtttaataacggaaacacaatcttaccatagctatcatttatatcttgcttttgttaaagcaacatatcttggacagatttctagcagttcatggggacctacctaatttaataacatgaattgccatggtttactagtctttcagagctgggaatttcattttttttccagtttgttgctgttagaaacaatgctgcaacaaacacatttattctgttatggtctgaaggtttgtgtctccccaaaactcgtatgtgaaatctaatttccaatgtgttcgtatttagaggtggggccgttaggaggtgatttggtcatgagggctacgacttcttgaatgggactagtgaccttacaaaagaggcttgagggaacttgtttcccccttccactgtgtgaggatgcagcaagaagtcgccacctctgaaggagagagtgaaccctcaccagatgtcaaatctaccagtatcttgatcttgaatttcccagtctccagagctgtgagcaataaatttatactgcttagaaactaccctgtctaaggtattttgttataggagcacaaactaattgactaagacaattcacatacctttgttgaacttctgtgagactatctccaggataaattcctagtaatagaactgctgagtcaaagggtaagcatatttaaaattatttctgatatagctaaatggcccttcaaaatcacaatccccccaatagtaaatgagagctcttatttctccacattcttaacactgggtaatgtttgctaatctgttagtttaaaacatatcttattttatttttagttttcagttagttatgtatgagtgtggcatttttgcatacaaatccaatttgtaaactctttcccaaagatctgactttttcttgccccactagaaacaacaatgccaacctcaggattactgtacagattcaatccatgtaaagtgagaagttcagggtttggcacacaataagtgctcatcaaatgctatttgaaaaaccaacctatcaagcctgactcacttcatttgaaaggattagagttactgaggttttattgtacctcacttcatcaatgggaaatgcagatttcagaaaacaatgtagatgggaggaaagtgctctccacacttacagtatttatcacattgtattttcattgtctatttgtctgtctcccctctagattgaggggtacctgaatttatggatattgtcttattttacatttcttttttttcccttgaaatcatgattttattgagttgaaggcatttcaaccacaggtgattagtatcatctgaatctacccacagctcaatcaagtctaaggctaaaaacattcaatctcttaaaaaaaaatgagcaagcaatttttcctctgtagttcaagttcattgagttgataactcttgtcccagaaggaaaaaactgctatcttataagccacaaactaaacatatgtagttaattaacaaattaattaacgtgagataccaactcagtcaaaatttcaacaacttacattaaaataagcaaagtctttccagtcatcttcaaattcttcctaaaatttattttaaaaagtgaaactatcaaaatatctatttatttatactttcatcacatttagcagtgaatttgatttataaactttaagcataagcttccataataaagaatacattgtatactggtacattgactttttgatttgagctttcttttcttttacttttttttttttttctttgcgacaatgtcttgctctattacccaggctggagtgcagtggctcaattttggctcactgcaacctccacctcctgggctcaagcaatcctcccacctcagcctctcaagtagctgggactgccaggtgtgtgccaccatgcctggctaattattttattttttatagagatgggggtcttgctctgttgcccaggctggtctcaaactcctaaactcaagggattcacccactttagcctctcaaagttttgggattacaggtgtgagccaccacacccagcccctcttttacatttcagatggcccatgtgaattgtttctaaatgtaggccaaaaattttataatcctcacttaatggtggctaagagctgcctcattagctatattagttcattagacaaagacacatttattaaaaataagaagcaggtggaatgtagtggtaacgcagatttaatttgttcaaaataactacattgtgggtttggaagtataagagaggttgctctgtgatcctttcctgccaaacaaagcctcactatgggttgatttttagcaataaatataaagagacttgaaaatgtcagttttgtataaagctaggatgattgttattcagtgttttattcttttactattaaattttagaaatgcaattttacatttctaatagtaactactttggggtttggcaattggtaagcaatgaataattgttgaatacttggatgaagagatgaatgaatgaggtatcagttctgttctcaggacctaagaagtatggatagataaagcaagatttttctccatctactgaatgaacacggcagggtcagcagtactggacaaagctatgacacatttagaatctgacagcattgaatgcacacagcagagcaattacagctctagttccataggcaaccctaagaaacttttctatcattgaggtggaaatactagcttttaaaaaaccgacacacctattagcttcttttcttctttaggtctttgacttgtttattctaggcctgtgggtactaatagatctgtggatgtatgcatttgccattttaaataaaggctaggaagggaagttttaaaactaatacgcatgtatgtttgtaatcgttgttattcaaggctacataagtttggatttcttatgtttaaacaagacacacagacatcctctaaacaactccacataagataaccattctgataggcatttagttaaatataaacaagtgtgtaaaaccccacacgatgaattgaaaataaaatgagaactcccctaaagttcctacttccagtttcagaagatgtttctccatagctacaacataagtaaatgtatacaagtttaggaaataatcttccagtaaacaatgaaaaattgttcacacaagagtgtgttctgtcttcgtcagctgagaaagtaaatgatagcattcaccagcaatataaactacctgaataataaacaaaatgttatctattttagcaatactttcgggtgctggatagaggctatgggacagggtaggaaggcaagagctggggctgggttgggcaactagggataatttcctactgattgtagttgcattctaaagccctgagagcggagtagatgtaacatcaaggtgttgtgttaaatcatcacactagataagactttataatagactaagcgatcagtggaaatggctgacttaggggtcattaagcctgacacattaggtcattaggctgacataggggtgagggatgacaggcaaggctgggcctgagagatggggcagagagtactccctattttagggagaaaaaaatacattgccctcacaaattgattttaatctttattttcctactggattggctttgggtctcatgaaggggctcaaaacagttcacagatggtaaaggtcttctgtctggtaatctacataatagatgcaagaaatccaggaccctgttgagggatggcatgatgtagtgtagctaactaactactgacctccaggctagttaggaggaccagatgagagaacgtctgtgtggtggatgtcagctgctcagcatccactacctcttttgggggaacattatccaaattttgttttaggggaatcacccctcctctactttcagccttgatgaaagtagcctaggttacaactaatcagtttatccatccctcctggccacagtgactggctggataatgggtacataactaaagccaggccaatcaggtcaataagactcaattccaaaattattgtgctttgaggaaaatggtcttgctctctctctgttttttaaaaataatcatacttggcattgaaatccttggtactacctggtgtcatcatgaatgaatccaatgcagcagaaagtagagtcaagaaattgagcagaagctaagtttgcatgatgttgatcgaatctatctagagttgcctatagctttactcctggatttttcaggaacaataataagtctccccactccttttcttgcttaagccatttgagatgagttttatgtcacttgcaacttaaactattctagtgtgtgaagcctttagtactgtgtctggcatatttatgctcgttcttacaaatatcagttttattttctttttcttttccctctccttctcctcctcccatctcccccaaatcttactttatatctctagtgtaaaacagaagattagatttgactatttcctttagaaagcatgaccaaataattactggaaacacttcttctgggcctcaatttcttcatatgtgaagtaaaggggttgcagaagtccatcttattctttcagccttaattttccagcagtctaaaaatcagttggcagtgatgatttgagaagaaaagttcatccttcccaaccactccttgatttttctagtgtggaaatttgtgtctttagagaagagactaaaactaagaaactgcagggccaaaatgatggaaacgcttcccttcaactgagctttctcaatccttgagccactgtgaattttaggccttcacttccatcctacttttgagtttaaatacaacggactattttgtagtttggtaagaaaaagcactgcattatttaagaaagctttggtctagtttagctctgctactatctaacggttcttgacatagcacatgtatgcaattcacatactgaaacggacaagtgattcacaagcgtcacagatccatggaaagtcatgtgtaactaacagcaggtaaattgatatatacagaatctggatgacttataatactttttaaagatatcttaagatgaatccaagtttatccctaaaataacattactcttgctcacatgtagtttgatatacgtgctcttgagcacgagagaacactgagcttcttgggattcctaataacttgagttatcttcatgaatcatgccatgagtttgaatatcactcatcatgtgagtgacagtaggaaagctagatttccttttttttttttttttttttttgagacggagtctcgctctgttgccaggctggagtgcagtggcgcgatctcggctcactgcaagctccgcctcccgggctcacgccgttctcccgcctcagcctcctgagtagctgggactacaggcgcccgccaccatgcctggctaattttttgtatttttagtggagacggggtttcaccgtgttagccaggatggtctggatctcctgacctcatgatcctgcccgcctcggcctcccaaagtgccgagccaccgtgtgagccactgcgcccagccagaaagctagatttctaaggttcttccatttccaggattttggatggtagacatggtggtggctgtggaatgtgaggatttgtggtagagacacggactgaggatttcattaacccaaatctgggaaatatgtgaggggagcaagttaagtttgaactaccacatttggtgttataatctcttcttgagcaaataaattttaaaagctacagctattttctttatacaaatgacagaatgcatagattaggtaggatatgaaagagaagactctagtttctaggtatcagtcaatttcaatgtgttgcagagtaggtggtggggaaagaagtaagtgttcctggggtgttttttattaaggtcttcagggcagagatttttttacttttatcaaaaaagtacgatttggagacaaactaagctcaggttgaagtcatggtcttccttaatttctctaaactttagttttctcaactataaaatagggataataatatttacctcatagggttgttgtgatgataaaatgcaataaaacatgtaaagcacacaacatggtacctggctcacagtgaccagggacaagctgaattaagattacaggtgtggtgttttaaagattgagcaatgttgttctagtttttaatttcatttctttttatttttcaaactcctgatacaaattattctaaattccactataaatgcttctctttggttcatatatagaaataagttctgctaaaggatgagacacacttagcacacacacaagtgaatatgtatgtatgtactgacacagcaagagggaggcagaagctgatgttgggctgtgaggcagacctgtgaggcagatccatggtttccctgacacccagatatacattgtgtaaatgacagctcaagactcatatgcatttctatatcacatggcgttttagataacattctctccctacacctcgttcttaggacttgagacttctttgattattccagtcacatctaactactgaattggaaattctcaatatcttgcaataattcagacctttacagaggaagcaatatcttgaaggtttccagtgtggaaaaccaaggaggtgagatttccaggttcccaagcacaggataaaaatccttgtagctctacagaatccctgctgcagggtgccttaggaagttctgaaccagagaagttttccacttggccaagaactcatgttagagttcattcctctccatcattttttaggcttctgactttacttgcaagtgcaggaaatagatttggttttgtgagacagatctctcctatgaaatactttcgtatggaggataaacctcaggagattgatttcaaattagaggatcatttcctttctctttgatggagtatatatagtctcaaagtttacaagtgtctctttaaaagaaggtacatttttacattcctgtaagtgtaactcaaggatttctaaagacccaactaggattaccagtcagataaaaagacattgttttatgatactacctcttcaatccaataaacattccattgcataaactttaaaatatatatactccagaaatttgtagaaataaaagaaaaaaggaaaacactaaacatggtgatattttatttataaggaattctaactatttattattatgcaggaatatattttaatattccctgtagaatgtaagtacaaggagaggctgggtgcggtggctctcacctgtaatcccagcactttgggaggccgaggcgggcagatcacgaggtcaggagttcgagaccagcctgaccaacatggtgaaaccccatctctactaaaaatacaaaattagctgggcatggtggcacgtgcctgtaatcccagctactcgggaggctgaggcaggagaatcgcttgaacctgagaggcagaggttgcagtgagccaagatcgtgccactgcactccagctggggtaacagagcaagattctgtctcaaaaaaaaaaaaacaaaaaacagcaatttgggaggcctaggcgggcggatcacctgaggtcgggagttcgagaccagcctgaccaacgtggagaaactctgcctctactaaaaatacaaaattagccgggtgtggtggtgcatgcctgtaatcccagctacttgggaggctgaggcaggagaattgcttgaacctggaaagcagaggttgcggtgagccgagatcatgccattgcactccagcctgggcaatgagagcaaaactccatctcaaaaaaaaaaaaaaaaaaaaagaatgagaacaaacaagaatattggctgtatcattcaccagaatacctagaacaatgcctagcccatggagtgcaataaatagacactgaatgtataaacaatgaattacttatgtagacataagtactttcagaggcaaagagaacatacatatatattccttttcttgtgaagatcatttcactacagtcaatttttttattttgatcttttacttgtaaaaagaaacgtgccatataattatttaaaagtaaccaaaacatagagtacatagaaaaatcatggctcataacatgaaattattaaaaatgagtattttgctctaccatactttaaagggttttgtggaaaacagcctgagggaagcatgagaggaagacacccaggtttactaccaagtgagatgctagcttaaatgtactaaattgtaaaataaaacttaagaaaagctttttacaaatggtaaaagatataacctatttcatactaatctgtgaggtttatagtattttcatataaccaattttccttaatattaggaaatatatttaaaagattttttatattctctcaaaaagatagtttctactcaccacatattctaggtgctccctgagtactcccagtctacttggcaggaaagttgcagccatgtaactattaggttggtgcaaaagtaactgtggttttaccattacttttaatacttttttggtcaatggattaggagggaaagtaaagtgtatcaaccttaggccaaagctgttcaaagctcttgtgcttcctccatttctttcctatttccaggctgacttttggggcttatcttccaagtggcagagctaccagatgaagtagagctgctcaacctgcatctgactttgtgtaagccacagtgtgtcagccacaagcgcctttgtagcagtaagatttgggacatgcctattcatcaccctggttaatacatattccctatttcaagtatagaacttttaaaatgacctaccttaggaataaatgaactcaagaaaagcatctcatatttcagatctcagattcccaaattgttatcttttgttttctgctcccttgttttgatcagatctcattaattcactatttacttaacaaacatttcattgagaatttactgtgtattaagctatgtgccaggtgctagagatacaatgatatccaatttcttaattcatggaccttacaacttgaaggtaaaacaggcattaaacacataatcacataaatcaatgtatagttacagaaaattaaaatataagtataaaataaatcataaaaataaaatagagaaaccattttaattaaattaggacttcaggaatgccctctgtggaaaggacatttaaactgagacagtctaggtagagaacagaatagacaaaggtctcgaggtggaaaaaagtatgggaggaaagagaggtgtgactggagagctaaggagtgaggagatagtgagatcaggggttggcaaactatgggcttcaggccaaatctggcctgccacttgtgtttgtaaataaagttttattagaacacagccacgcccattcttttatatgtctattgcttgggttacatcagtagatttgagtagctgcaacagactgtatggcttgcaaagtctaaagtatctggcctttataaaacatctgctgacccctgtactagatcattcaggaccttgccagccatgttaaggatgtgagatttaatctcatgtgcaaagggaaggcattaaagggctttgaacaggaaagtgagtggcatgaacagatgtgtgctctaagaaaaccattctggttatttgaagaatgaactggaaaggggcaaggatggaaaagccagttaaaataagacagtgtcttgacagtgacagtgacgatgaagagaagtgaattcaaagtctatttttgaaaaaaatatcaatacgatttggtttcagattgcatattgtggtgcaggagtggaaaatatcaaggatgatttcggatttttgcccaaaaaagctaggagattggtggctccattttcaaaaatgggaaagatgggggaggaaaaagttcagaataatgaaagtaggcaatcaagagccagtgatgaacgtaagtttgatcttaacatatatatatattttccaaaaacaacaaaaaaggagtaaaacaactctcaaaaatatattctgaattctactttctgtccagggctgggataattttcctctattttccttgtattcgttcctttaaaaattccatagattctgtccattcaaagaaaaggccacatttagtgagactgcatatatttcaggatctgtttgggagaagattttctttggccgacacctcccaagcttcatgaaaacatctatttatcctgggacacaaggagattttcagtctgttgcagcttttatttgcactgccaaaaggaaaaacgaaagggtttcaatagtcctttaattgaaacgtccctggagcagaggatttgtcctaactcacatttggttttccaggctctcactggagttctccttccacaatgcctaaaaaagccctggttttctatgatgacagtccactaaaatgctccactttcccaatactcaccagcagtatgcagccaccccttattatacattgttattttggcctactcagcattatgccctctatgaaattttgtgttaagtggtattatgattggactattttcctgaattgggcaaggttttccccttgagccagcatactggtttgcctctaaggatatcactttatcactgcagttgcataattgggttcagctttagatttgtagctgctcaaatgagcaaaatacatctcagggctgggggatttgacctaaagctttgctgtcatccatttggtttagtaaagagaagtttttgccttgacattataaaatgctgaatttgaaaaattgagactaagcagatggtgaaatttttatttatgatagtgtcaaaatattcctggctccttttgtggaggaaatctactggtttactgtggacattcttatcttctttcctaataagacaaatggagttactcttcctgttatattttgacaggaaaaacaacgattggatctgggtattttggcaaaagctcttaaatcagagggactataatctttatgatattgttagccactcccgagaaactactattatgaatacagtaaacaaataggcattttatttttaataaaaaagagtgaattaggttcaactgacctcaaggttctaaagtgcctttcctgactctgttaaataatgtaaggatatataacaacagcaagaattcacttgctatatttataatagaaatctattttagtgaggaaaactatattttaaattcaaggatgcttcattttttacaaacatgaatttggaatattttatactaaagaattcccctagtcccacagatcagttataaatattaatggaatttcaagagattcttttctgattccagtgcttaatattcattcatattatgcagggaattcaatgtcctgtacagtacatatggattcttctcattatataaatgagcacatatatggaatctgtaggggcaatgacaattaaaaatagcagggcccacatacgattttagagggcatataaaagccttctcagctcacttaataacaagaaatttactggtaataaaccaaaggactctttaggctcaatttactcaataatgtcacatctgggcaaaaagatggattggtgattctgaacagagttaaaaatgctaactgatataaagtatttatgaaacgcaatgaagtgatttcctgtggtgagattctgcagtcagacttcgaaacctgctcttgaattagtctcagctctttgatttgctaacgatttacttcacagtgcttagtcttctcagactatttgtagtgtaaattttttttggaaaaattcttattcaaaaaatgatttgacatcccataaaaagaactgcatctaacttcatgttctctgagtttaataacttattcaggtaataagatattgtttagccttcctaatgtgtaagtataagtattatttttaacaaagggtgatttttaactaaacctgcactattagtgtgtcattctctcttctgtctctcaaaataaaaatttatataactaatggaccaaaaccataaaataatttgtatgtgacaacaattataaagttggcatttactatgcacctatgtgccaggcatgatattagaagttttggatatactatctcattcaatctttataacatttctgggagccattatagttacagttcaggtaagtaagtgaagctcagagagattaagaagattaatcatgatcacagagctattaggttgaatcacatgaaaatgctgatattggaccatttttaatctataaagacagcaatatcatatgcttcaacctaattctaagtgctgagttacagtatgaaaataggtctgtgtgattcagaagtccattgcagtatattagataatactggttattttttaccactcataataataaaaaccaaatcatgaattatacaataaagaattaatcactcaccaagttgggttaatatgaactcatcatttatggcaagattccaatgcaagatagcatttcattttaatatcattctgatataaaaagagagataattgctaaactgtggcagagaaatggcacatttacagagcttatcatatattttctaagttaaatatctcagctggagcacagttgttctttaacaaactattaaaaagaaatatccttcacaaagagaacagtgggattctttgaagtgtaaccttggaaatcacggtttgtgttacggggcatcattcaaagcagatgtatactcctcagagaccacagtaaaactgttgctaagaatacttgtttctccttttcaggttttactgacaatactatatagtcaagtattcccagtgttctaggcatggtacagaacatccaaaaagaggcttctaatcattctaattgcgaagaactcacatatgcttttcagtggctttcagattcagcaattaaacgaagagcttattcattttatgtgatttaaagggtagtggtaacagacatctagactgttttagagataaacaatttgctgactagccattacttttccttgcttgctaagtgggtgaccagtgctgaagtattaattctcaatgttatttcaggagcagggaagggcatttcagagttgcaaaaaggactactggctcagcaaatatttatcaagcactgaatacacattcctattatgccgtgatgttagtgtctcttattttcaatcttgatcaagataagaagtatcaacagatgtgtcacatgtgtgatggattgtggcatgtattcccactaatggagaaagcttctaattttggagaaagcagcaggctctgcagtcagagcgtattacttctttagcccatgagacatttagactgatctgaagaggaattcttgacagtgaggaaagtggtgaaatcttttctgagggagctctaggcaaaggaatgatcccatctctttgggataatgttgtcatggtcccagataaaaatggaccacaatgaagacttgtcaaattcttatccagctcaagtctttactgtttcccaggacctgaggctcacaagcagtctgtgatttacgcagttttatgatactgttctcaacttgcaaaggttttgagatgcctccagaatgatgaaaaccaggcacttatctgggaagcagagcagctcacattattttgagccctgggcttacgacccagagtgttgacagcttcacttcagaccacagtaaggacttaacttcaagatccttcaaaacagctcagtcccacagacagcctttttccaggttccctctctgaacagattgacatggtgcaggtattatggaaacagcaagctgagctttctatatttgagattcagagtatgaagagctctgttttaattcaaaataaggttatcaaatagatgtcgatattgccatttaggcagcagactaaatttctgcaaaggaaccaacctaaagaaaccataacgttcctatctaagttcatcctagatattccaaaaagtgtctgggctatcttaatttaaacaccaaccccccccaataaaaaagcaatgatggatataaagcaactgctcacaccagaaccatactgaggttgtagagagttgtgggagggccacaaagtaaactaaacagcaaacaagtttaaaatctacatattaatccctctggtcaagctggaacttccaccacctggttttcttttcgccctttctttgttccttcccctcccccattgcctcaggatatctgaaattttctcctcaattaggcagagtaatttagctctctctcctcccattttcaaactagcatcttatctttataaatgctccccagaagaaagaataatcctattaaaaggactgtaattataatagcaaaagtaagttgctattatatttaatacagcagttttttcactacagaatagtttgttacacacttattacttgacctttgttagtggggaggtctgaaagactgcgccagttcccacctgtgacccttgctggttttccctctgtctttacattggccatccctatctctttacagagccaacacacagtggggtttcctcttgctgtttcctttctcagttggcagcagagacggtggcctctgtccatgttttctgatgctctcatctcatctatgacctataaatttcagatccacacatttattcatcatgaacagtcatctgattctcattcctgctttcccccggacaaatgatggatagaaactatactcagtccccaccacatctggctggctcttagattctgaaccaattcttggccaacctgaaggtcttttataaatctcagcctgacagccacacatttaggcctatccacaagggaaaatatcattttcagagagcaaggcaggcagaacatgaggtgtaatgttgacacaaatgggacttagggtatttaatgtttaagactcacgttttagtatggatgctgtatagatctgtaatttggacttgtttatagctatagaaatgccaggcagctgtagacttaaccttttgctatttcttggacatttcatgacttatatgcatctattgaacttttttggcatccccaggagaaagttaaatcatattccctattaaagtttctgatttattcatggatttaaatgttccatagccctcatttttcatttcctcaccttaaagaaaagagattattgggttaatgttgacagaagaccataacttttcctttgaaagctcataatattgtcacaaggcaacatggcccttcctggttttgatcatgagtgtgagttagcattctatatattgtatagatccgagcatctttttatattcatgagaactcttacttgactgcaaattacgagtgcaacagagcatcaccttacttccttcagaatttctcatttgagcagacttcatgaaactgtgtttcatgacggtagggactatggagtcctcagttcttagcacaatgcctggcacacagaaggaattcaatacatatttgtatatatttgttcaattgaatgaggatgaaagacacaaatatttgggagttcaattgtgctgaaagacacttccacagcagtatattccataagatgtatttaaagtttatttttgatttctatagttagctgattttctactttcattccatctctggcattgattttcatactgagttaagttgctttgcaagtgagagggcaaatgttgtcttagatgtaaatctttccccttgaggataacttgacagggaaactagaggctgaaaggggtctgttgtttgtttttactttgtgtgcaaatgttctccttacaaaatgggctgggttatttcattctctaataaaagtcccctcccctttattttaaataacagagatggagttgggatctacatattccaggctggtgtgaactcctggcctcaggcaatcctcctgccttggcctcccaaagtggtgagattataggcatgagcaagtgaacctggtccccatatttggttttaaaagtgagaaatatatgaaatcacaatattctattttataatttgtgcctattaatttaaataacaaaaaatatttatttttacgtatgtatatatgtgtatatacacatattgtatataagtacatatatacattgtgtatatatatatatttttcttcctgagagaccaccccaagatctgatattactatcacatgatattctatgacaacactaaaataatgagatgaatatttgcaattagtatttgacagctgttaattaaattgctttaacagatttatagggaaaacatcagttacataactgaattacaaataactatgtctattatataaatgacaaaatgtcatgattactagtcactgcttattattttaagatgaggattactaatttatctgagaggtctgatattttaaaacaaaagcccaaacgggaaacctgacagtttttcatgattatggttcttcttttcttttccttctctccttttcccttcttctcagtcttccttttttgttctacttaaaaagttttgcctgtctggattgcattttctgcaagttcaaatggttccatgttcattcaattcttttttttttttaatatgtatacatttttattatactttaagttctagggtacatgtgcacaacgtgcaggtttgttacatatgtatacatgtgccatgttgatgtgctgcatccattaactcataatttacattcggtatatctcctaatgctatccctcccccctcctcccaccccatgacatgccctggtgtgcgatgttctccttcctgtgtccaagtgttctcattgttcaattcccacctatgagtgagaacatgcggtgtttggttttttgtccttgcgatagtttgctgagaatgacggtttccagcttcatccatgtccctacaaaggacatgaactcatccttttttatggctgcatagtattccatggtgtatatgtgccacattttcttaatccagtctatcattgttggacattcgggttggttccaagtctttgctattgtgagtagtgctgcaataaatgtatgtgtgcatgtgtctttatagcagcatgatttatattcctttgggtatacacccagtaatgggttggctgggtcaaatggtatttctagttctagatccctgaggaatcgccgcactgtattccacaagggttgaactagtttacagtcccaccaacagtgtaaaagtgttcctatttctccacatcctctccagcacctgttgtttcctgacattttaatgatcactattctaactggtgtgagatgatatctcattgtggttttgttttgcatttctctgatggccagtgataaggagcattttttcatgtgtctgctggctgcacaaatgtcttcttttgagaagtgtctgttcatatccttcgcccacttgttggtggggttgttttttttcttgtaaatttgtttgagttctttctagattcaggatattagtcctttgtcagatgagtagattgcaaaaattttttcccattctgtaggttgcccattcactctgatggtagtttcttttgctgtgcagaagctctttagtttaattagatcccatttgtcaattttggcttttgttgccattgcttttggtgctttagacatgaagtccttgcccatccctatgtcctaaatggtaatgcctatgttttcttctatggtttttatggttttaggtctaacatttaagtctttaatccatcttgaattaatttttgtgtacggtgtaaggaagggatccagtttcagcttcctacatatggctagccagttttcccagcaccatttgttaaatagggaatcctttccccatttcttgtctttgtcaggtttgtcaaaaatcagatagttgtagatgtgtggtattatttctgagggctctgttctgttccattggtctatatcgctgttttggtaccagtaccatgctgttttggttactgtagccttgtagtatagtttgaagtcaggtagcgtgatgcctccagctttgttagcaggctcttttttggttccatatgaactttaaagtagttttttccaattctgtgaagaaagtcattggtagcttgatggggatggcattgaatctataaattaccttgggcagtatggccattttcatgatattgattcttcctatccataagcatggaatgttcttccatttgtttgtgtcctcttttattttgttgagtagtggtttgtagttctccttgaagaggtccttcacatcccttgtaagttggcttcctagtattttattgtctttgaagcaattgtgaatgggatttcactcatgatttggctctctgtctgttattggtgtataagaatgcttgtgatttttgtacattgattttgtatcctgagactttgctgaagttgcttatcagcttaaggagattttgtggtgagatgatggggttttctagatatacagtcatgtcatctgcaaacagggacaatttgacttcctcttttcctaattgaataccctttatttctttctcctgcctgattgccctggccagaacttccaacactatgttgaataggagtggtgagagagggcatccctgtcttgtgccagttttcaaagggaatgcttccagtttttgcccattcaggatgatattggttgtgggtttgtcataaatagctcttattattttgagatacatcccatcaatacataatttattgagagtttttagcatgaagggttgttgaattttgtcaaaggccttttctgcatctattgagataatcctgtggcttttgtctttggttctgtttacatgctggattacgtttattgatttgcatatgttgaaccagccttgcatcccagtgatgaagctcacttgatcatggtagataagctttttgatgtgctgctggatttggtttgccagtatcttattgaggatttttgcatcgatgttcatcagggatattggcctaaggttctctttttttgttgtgtctctgccaggctttggtatcagcatgatgctggcctcataaaatgagttagggaggattccctctttttctaccgattggaatagtttcagaaggaatggtaccagctcctccttgtacctctggtggaattcggtggtgaatctgtctggtcctcgactttttttggttggtaagctattaattattgcctcaatttcagagcctgttattggtctattaagagattcaacttcttcctggtttagtcttaggaaggtgtatgtgtccaggaatttatccatttcttctagattttatagtttatttgcgtagaggtgtttatagtattctgtgatggtacttggtatttctgtgggatcagtggggatatcccctttatcattttttattgcacctatttgattcttctctgttttcttcttttttagtcttggtagcggtctatcaattttgctgatcttttcaaaaaaccagctcctggattcattgattttttgaagggttttaataactctatctccttagttatttagcttagctagctctgatcttagttatttcctgccttctgctagcttttgaatgtgtttgctcttgcttctctagttcttttaattgtgatgttagggtgtcaattttagatctttcctgctttctcttgtgggcatttagtgctataaatttccctctacacactgctgtaaatgtgtcccagagattctggtatgttgtgtctttgttctcgttggtttcaaagaacatctttatttctgccttcatttcattatgtagccagtagtcattcaggagcagcttgttcagtttccatgtagttgagcagttttgagtgagtttcttaatcctgagttcttgtttgattgcactgtcgtctcagagacagtttgttataatttctgttcttttacatttgctgaggagtgctttacttccaactatgtggtcaattttggaataggtgcagtgtggtgctgagaagaatgtatattctgttgatttgaggtggagagttctgtagatgtctattaggtctgctgggtgcagatctgaattcaattcctggatatccttgttaagtttctgtctcgttgatctatctgatgttgacaatgaggtgttaaatctcccattattattgtatgggagtctaagtctctttgtaggtctctaaggacttgctttatgaatctgggtgctcctgtattgggtgcatatatatttaggatagttagctcttcttgttgaattgatccctttaccattatgtaatggtcttctttgtctcttttgatctttgttggtttaaagtctgttttatcagagactaggattgcaacccctgcctttgttttccatttgcttggtatgcttggtagatcttcctccatccctttattttgagcctatgtgtgtctctgcaagtgagatgggtttcctgaatacagcacactgatgggtcttgactctttatccaatttgccagtctctgtcttttgattggagcatttagcctgtttacatgtaaagttaatattgttatgtatgaatttgatcctgtcattatgatgttagctggttattttgctcgttagttgatgcggtttcttcctagcatcaatggtctttacaatttggcatgtttttgcagtggctggtaccagttgttcctttccatgtttagtgcttccttcaggagctcttgtagggcaggcctggtggtgacaaaaatctctcagcatttgcttgtctgtaaaggattttaattctctttcacttatgaagcttagtttggctggatatgaaattctgggttgaaaattctttcctttaagaatgttgaatattggccccccctctcttctggcttgtaatttctgccgagagatcagctgttagtctgatgggcttccccttgagggtaaccggacctttctctctggctgcccttaacattttttccttcatttcaactttggtgaatctgacaattatgtgtcttggagttgctcttctcgacaattatctttgtggcgttctctctatttcctgaatttgaatgttggcctgctttgctaggttcaggaaattctctggataacatcctgcagagtgttttccaagttggttccattctccccttcactttcgggtacaccaatcagacgtagatttggtcttttcacatagtcctatatttcttggaggctttgtttgtttctatttattcttttttctctaaacttctcttctcgcttcatttcattcatctgatcatccatcattgataccctttcttccagttgattgaatcggctactgaagcttgtgcattcgtcacgtagttcttgtgccatggttttcagctccatcaggtcctttaaggacttctctgcattggttattctagttagccatttgtctaatcttttttcaaggtttttaacttcttcgccatgggttagaacttcctcctttagcttggagaagtttgatcatctgaagccttcttctctcaacttgtcaaagtcattctctgtcctgttttgttccgttgctggtgaggagctgcattcctttggaggaggagaggcgctctgatttttagaattttcagtttttctgttctgttttttccccatctttgcagttttatctacctttggtctttgatgatgctgacgtacagatggggttttggtgtggatgtcctttctgtttgttagttttccttctaacagtcaggaccctcagctgcaggtctgttggagttttctggagatccactccagaccgtttgcctgggtatcagcagtggaggctgcagaacagggaatattgctgaacagcaaatgttgctgtctgattgttcctgtggaggtttcgtctcagcaggatacctggccgtgtgacgtgtcagtctgcccctactgaggggtgcctccgagataggctactcgggggtcaggggcccacttgaggaggcagtctgtccgttctcagatctcaaactccattctgggagaaccactactctcttcaaagctgtcaggcagggacatttaagtctgcagaggtttctgctgccttttgtttggctatgccctgcccccagaggtggggtctacagaggcaggcaggcctccttgagctgcggtgggctccacccagttcgagcttccagatcgctttgtttacctactcgaacttcagcaatggtgggcacccctcccccagcctcgctgctgccttgcagttcgatctcagactgctgtgctggcaacgagagatgagcaaggctccgtgggcatgggaccctctgatccttgcgcgggatataatctcctggtgtgccgtttgctaagaccattggaaaagagcagtattagggtgggagtgactgattttccaagtgctgtctgtcgcagctttgcttggctatgaaagggaattccctaccccttgcgcttcccacgtgaggcgatgcctctccctgctttggctcatgctcggtgtcctgcacccaccattctgcacccactgtccaacaagccccagtgagatgaacccggtacctcagttggaaatgcagaaatcacctgtcttctgcgttactcatgccgggagctgtagactggagctgttcctattcagccgtcttggaactgccccccgattcaattcttaagtggacaattttgtgttataaagttcacggctatttgtttaattggaataatcatgaactcttttaagtgtcacaaggtgacaggatttaaagcctcaggcccatcccagttatttataacatctcatattatgtccttctttttataaagagttgacgtaataaatagccatatggaataacacttctgcatattttgcaaaacagccattgaaggtattatatattatattagtgtttgttactcaaagattctaacaataaaattcttgtgaggataaattctatgaatacattctaagtttgttcatttgcttttcttcttttaagatgagttggattattttctttgataagatattgaaaactatgtcattatggctattggccatcacatctctagaattcagatagattgtcttaatctcctcagattgctgactattggctattggccatcacatctctagaattcagatagattgtcttaatctcctcagattgctgcctattggctattttattgatcattaacactcctcagatggtgacaaggaaagaatgctaaatttctgatcattttcagggttgcttactcattttatttatttaagttgccctaactcctatctgtattggtaacagaggctgcattcacctaagttagacttttatatttatgccctttgcttcagagactataatatccaaattgaagactggaactgttaattataataatacgtaccataaatacttactttctaaatgccacacaaagtcttcatatgttcgaatcatttaattctcagtaaccctttggtattggtatggtattattttacttatcttattgaggaggcaacagatagtttaatttacccaaagttacacagctagtaaatggtggaactgagttgagtctggactcctggacagtctaacttcaaatttaagatcctgggatggacctcagagatcttcttgagaggtaaatgtatctcacttgtggcactattccttatgttctctacatgacagatattgctgattgttggaagatctttttctactgagtctatacccagcctgggaatcattcttagttgttgttctaggtggcaactacttattgaatgattctcacttgtgttgaaacctatttatcattcacacaggtataatctgttccttttacagaacaatttatactaaatgttttagtagaaactggctagatgttcaccaaatccactttttcttcttcctacatatataggtagactacatttccagctttccttccaaataagtgtggtcacataactgtgtcctaaccaacagaatgtgagcacacttgaggtgcaccatttctaggcctacccctaaaaactcctctggctctcctccatcctctttccatccacagattgatgcctatgagcacactgactctggtagttacctgatgaagttggcagagtcaaaaaatggatggagcctgggttcctaaataaagctttgaagaaagctacctatcaatcacaaacacctgtttgggctttaggtgagcaagaaataaacctcagtcatgttcaggccattaaagtttttgggtatgtttactaaaaacactagcgttacaaatacaagacctatacaaaagtacaacagtagcatttttcagaaccagaatctgaatgtaggtcttgtgagtccaaatacttcccactacgccaatcttactaattttaaaaactacccaagttaatatgataaacaccttattttaacataaattttctcaaattttaactccatgaagatttgagtttattggcaacaagggttctttcatttctaaaaaaaatctcaagtatttcccaattgatgccttcaggaacgaacctcccactccaattatctggcctacaattcctgcccaggtgtgaagcatgaaaggtgacatcaagtcagggtttctcaaatatatacttgggaaccatttctgtgggatgttagtaggtttggtgctgaaatacaatatcccatgataaagtacatttaggaaattctagattaaaagaagtaaaaaggtgtcttttctgtaggaatatcctttaaaaagataatatgtcctgatattctccaaaataaatgtctgtagtattttgcaaatttatttgatgacagagccctttttcaaagagcaactcaaggaaatagtgttccactgaacacattttgggaaacacaaacaaggatattggggcatattcataactattgttacttgaagtcggtctagtacatcttggaatctactccctctgcctaaggaaattttggttctggctgtggctttctacatctactgtactacctattcctgacttctaacaaattattatgccttgatctttgggctacttctatatcctctagctctcttcaagacttaacaactgactgtattttgtggtctcaaccatgccagactttgtttatcttgttgcttctctaccttgacagaacacaaatgtttcattggttgtgtatgtacattgtagtattaattattgattcaatcaaacaccccacataaagcaagggtgtggggtagtgttactggcataaagaaacatctcctggccgggtacagtggctcatgcctgtaatcccagcactttgggaggccaaggcagttggatcatttgaggtcaggggttcaagaccagactggccaacttggtgaagccccgtctctactacaagtacaaaaataattagctgggcatggaggcgggcacctgtactcccagctacttgggagcctgaggcaggagaatcgcttaagctcaggaggcagaggttgcagtgagcagagatcttgccactacactacagcctgggccacagagcgaaactacattaaaaaaaaaaaacaaaaaaactcttactgtcctagttaaatatcaatatcaataaaatagagtgaagttacattacatgggcatttgtagtatgcgaattcaactagacccatttagtaccctggcccccagatagtgagaaaaaaatagtttaaatgcaaagcagttagattttacgttatgaaatgccattactggcattctgtctcacttaatttaaaactcgcataattgaagattaatttcccatacagttgtcaaagaaaagcaggtatttctttgcttgctgaagtggcaccaccatgggctttagcaaaaacatggtttccaattcatgtagccactcctttcaatattgtatgattgctgatataaaaaatttttaaaattctattatttcaaatgcttccaatcatgagataatttattaatattttatgttgtactctttcaaatttgcataattttataaattattactgcactgtactgtgggtgcttttacccaccatcccactccatttttatagcagatgtatagtccgttaggagatatgactctgctatttctttccttcctgtgtgcctttcatagtagaaaatatcactgggtcctataaatccaaatcaacttttaatctggcttcaccaaagaaacagaaatctattgaatgttgggaaaatagttgtactgaatttactgaaagatgttacatcattctctaaaatgtcatgtggttttaagaaactttgaaggtaattttgaatgtacatgactctttttatgtgacaactttagaactttacctcccatataagatgtgactctacttgaagataatggacattattgattgctaatccagcatttagtacttccttccttcttcctaacaaaactctattttattcaggtagcactcctcataactaaaggaaagatgaccctagtaccagttccaggagtagaactggacttgtataggcttatcacattgcttccaccctctttgctagcacctggttttggagtactcaagtaatccaattctggcctgtggcacatgaggagaagtctattaaagggcttctgtaaagatttccttgattagtattattatttattgttattattttttgagatggagtcttgcactgtcacccaggctggtgtgcagtggcacgatctttgctcactgcaacctctgcctcctgggttcaagagtgattctcctgcctcagcctcccgagtagctggaattacaggcgcttgtcaccatgcccagctagttttttgtatttttagtagagatagggtttcattacattggccagtctggtcttgaactcctgacctcttgatccacccaccttggcctcccaagatttccttgattcttagaaaggaacagagccagtgatagttcatttcattcctaagcatgttgttaagttcagtgtgactccaacagctattgccatcttgctgccagtcctctgaggatgtcagtattgggagtggaagagagcagagaaagataaaacctaggtctttgaagagattgctcagttcctgaatcaatgaaccctgaagtctctccaatcttctccttagataatgtattagtcaactcaggctaccataacaaaataccatagactgggtgacttaaacaacagaaatttctcacagttctggaggctgagaagtccaagatcaaggtgctggtagatttggcttagctggggctatcttcctggcttgcagacagctgccttcttactatgtcctcacatggtgtgtgcaagccgggatagaaagagagagctttctcttttgctcttcttttaaggtcatcaaccccacagggttagggcgctacctttaggacctcatttaatcttaattacctcctaaaagtcctatctctaaatacaaccatattgggattagggcttcaacctatgtctgtggaggagacacaattcagtccatagcagataatataacaaatgtctttatgctattaaacaagtttaaatttttttttctgttatagacaacttaatacaccctgacagatatcatatcttatgatgaaatatacacaggataatgtctaattcatggcatataacatgaaaagatcaagggttagtctccttttctcagaacaaagcagttgtagagttaaaaatagtccattgaagttctaaggcattttatgaactgctgattgtacatatatgtggtatcatgttaacataaacagtccagccctaagggagttttaagttataaaagaaacatttttctaagatcatgagctctgatataaaaaccatactccagcccagttctatcattatgaaggtctggcgagccaagagacattagttggtgattttatcaagccagacttctaactaatggcttggtgaagccattactgtcccataaaacactgtaacagattgacaggacaattcaagagttttagtcattttacatccttaacggttattccacaaaaagcagcattctcagggatcactgcagtcctacaaatgagaatacactttcttcacctttttgcctaaaaggaatcagttatgtttttcttacaattcaaatctaatttttataactatcttcaacaaaaagggtggagtgtagattcaccacattctagtgaagctctcataaaacattttacccgttacattgtttataaagtaaatttaccatttttccccagataaaatgtaaataaacaataaaattatattgaaatgaaggattttcataacatagtaaaattctcctttaatttctagccgagggagtggaagagcagcacttatcaaattaaaaaaaaatacccaaaccaaacaaacaaaaacaaacttcaccaagaaacaaatgagagatacatgtgcatatagatgcatccatattaaagcaatagaacttgggccattttgaaatcttaaaccttctgacactattttcatgaactcagtaatataaaccatgtggtgaatgaaattctgaaaaactttgctggtttcactgtgtattttattactggccaaatgtgacattaaattttatcccctgtggcttggagttaaatgcttgctctgttcagaatggcaacactcaattaaacagcatttttcatgatctacacccaccattgttgctgtatttaagggaaataataggggtactgacctatattgcgcttcttattatcaatggagacgaagcgtatgcagggattactggtgatgtactgcccagcccaagggacatcaatcttcgtaccagcttcataaaagaggcccagagcatatcgagaggagtagctcacagcctccagttgctgcctttggcattcactaattactgtggaagaaaaaataaaaggcatcaaacttaaaaataccatctttccttttagcacatcaaatataaaattcctttaaaccagttacaacagcttccaccaactccatctcacttacaatgaattttgaaaggtaatgtaaaatagcaccagctctaatttctttttggaataattattaactttggcaaattgtttttatcaagctgaaggtccacattctttggaatggcgttcaaggttctcaaaatctggctccaaattgcttttctagtctggtatcccagtccttggactgtctggccacattatagattccatacactgaccccttactacaagttagggtatttgctatatacttgacataagcatttcactctatcataacaacagttttgaaaggtagagtattatttccaagttacagatgaggaggctgatgctccatctgttatgacctcttaaattattccatggatacaaggggggaataacacacactggggtctgttggggatgggggcattggggagggacagcatcaggatgaagagctaatggatgctgggcttaatacctaggggatgggatgatctgtgcagcaaaccaccatggcacatgattacctatgtaacaaacctgagcatcctgcacatgtacacctgaacttaaaagttgcagaacacaaacaaaaactgctacacacacacacatacacacatgcacacaaattcttccatgtcatagagtgatttgtttgcctgtcatttttctgccagtggattatgggcagaaagatgccaataattaagtccctctacttaagcagagggaccacaccttagtcatctttgtttataggtccctaccctactcattacaagcacaccaaagatgaaactttaaagggatagaaaggcaaacacagacatgcaaagaaataatgtctgtgtcaacttcttcacaaaagaagttgaaatgtaggaggtaaataataggaaaagcctggaaaaggaattgagcaggtttaggttcaaatcctgactctccacttaccagatatgtgacactggtcaaactacttaattgctctgattatagttctcttgtctatactggcaataatagtacagaatgcattagtctgttgtgaggattatatgaaataatgcatagcacagtgcttggcatataataagtgttcattaaatagtaactttttctactatagatagaaaaaatatttaggaaaatgggacaagaaaaaatacttaggaaaatgggacagtgttccatcttgaggtggggaaagaagacatttcttctactttttactttctatctccaatacccctacctttaaggtctcagggagctgcttgtttatgtatgtacaacattaatagtttgggtttcagagaaggtcatagttctgttctgccttaggaaggctcattcagacatggaacatatgagaaattctcatttaattggggtaaaatatcctaatctacaacagtagggataagtgaacctcaaggatgagggggaaactttagttaaatcttacagaagtggctttaggaggtagagagaggcaggaaagggattcaataaattattatagcacagtaataatcctatacattatttcagctacaaaacatttttagaaccatgacctcatttagtcttcacaaaagccatcctcattttacatccccaggaaggtgagattcagattggttaactaacctgctttaggttacaaagcttccagattgcgtggtcaggatgaaggtagagctcccatattagagttacacatatattcttactaccctatactttcctctgctcatctgcaagtctgagtttcagaataaactttgacattgctttctcctgtgacattaatggctattttgtattcataaataaaagccatatttccctttaactataattttctgccttattaaaagctgtaactacttgatgaacgaatgatctgacattggcctcattacactcaatgaatttggaacttcattttttaatttaatctgcttttaaagttatggcttgatattatagttactgttttctaagagggaggaggtgaaacattaatgctagcagctgagcacataatcactgtttcccattttttaaataaaaaaacaaaacaaaactgtgtagttagctacttagtaactgaaagggcctaaaacttttattttttttaaccaacactgaaggatcaataggttgacaaccaaattggtcctctccccacccccctttttgctagcttttagacaaagtgccaagtggtaaatcccactaggtagccctttgaaaaggtaattgatatctatatagaaacagcaattaaccttacacacccttgtctattccaggggctctacaattcattccgagaacagggaggtgagacttctgactgaaacaatctcaatttctggacattcactgacaaaaactttgtcttcagaggcttaaaagttttttattcttgcaaggcgggcaagatcttaaaaaaaagtcttactttgtttaaaaaagtttctagtgcaaaatactaaagaaaccagccctaggtcccacatattttggcaagcaaaacaatattctttcttatcatgttttcaaatagaacaaacgaccacaaatcaaggcttatataaaaaggcccaattccaatataataaatctttacctggctgtcatcctcatttaattctcagccaataggattatataacacacacacacacacacacacacacacacacacacacacgtacgtatatgtaggatatgttatatattatatataacatatcttacacatacataatataaaatatattttatgactatgagtaaaatggctaaaaattgtagtgaacagagtagttcacatgcatactttcattaatgaggaaaattgttcttatttcattctccttgtgccagtgtctttgtgtgcatgagtgggtttgtgggaggtgaagagcagagggagaaaaagagagagaagaggagggtgagagagaggaacagaagacctggctgtactcctgaataacactgagtaagtaatttcattttctttgtttcctcacataattttattctcttagtttccaaacctataaaagaaggctaataatacatattctgcccattttctacattttttggtgacaatcaaatcaatctattcatccatccatccatccattatgccatgcacttttctagacgtgaaggctgtaaagcagaaagataaagtccctgctctcctgtagcctacatactcgtggcagaaaggccattataaataaataatcaagtaaatggtatgtcagttggtgataagaactataaggaaaaataaagcaggtaaagggatacataacaggtttgagtgaggctattttatatagactgtcagggatatgtgttacctctgaggattttacttggatttacacgggaagctactactcgttatgagccaaggacagacatggcatgccttctgtcttaaaattctcattctggctactggtgaagatacaggggtgcaagagtggaactggggcaagcagctattgcagaagtcttagattagagagaacagtagaggaagccagaagtggctacagtttggatgaaatatataggtgtgtgtgtgtttgtgtgtgtgtgtgaatatgtgtatatactcttaaataaaaattatgagaggctattgatttgggctaagatcttgtactaggtcccaatagtccaacctaaactggagtcactcatgctaatgttcctgatcaccaaaccaaaacctaagctgtttacttgcaaggtctgacctgagagattaggggagaaagtaagttttctgaaaaaaaaaaaaaaaaaaaaaaaaaaaaggaaatccacagcaaccaattaaaagggcccagtcaacctgagctgagcgggcataataaccaagtcccctctgctttaatccatacaaggagagtaacctttagtaacctgatgttaaccaatttaccttttgcactagatgtttccttgttcccgctcaagttgccttacaagaaccaactcacggccagtggagctctctattaaaccaattcactgcccatgacttcatggccagtggagctcttgtctattttatagactggatgctgtctggttcatgaattgctaataaaagtcaactaactcattaaaacttcatttgttgaaatgttgtcatttcacatacatgcacacaatatatgtacacataaatatataatatatataatgtaaattttaatagaggtttaacatacatagagaaaattatgccttgatgaattttcataaagtgaacacatctgtaaaactggcagtcagatcaagaaacagagcattaccagaaccccagaagctaccttctgctccttttccaggcactctcttcctgctgcaggtaatcagtaatcaattccaacatcatagattactttagctgtttttgaactttacataaacagaatgatatggtatatattttttgtgtctggcttctttcactcaatattatgtttgttatataaatgttgttagatgtagttgtagttaattaattctcattgtgggacagtattgcttatacgtatacactacaagttacttatccattccactgttgatgaacatagggattgtttgtagattttggttattacatatttaatgtgaagaacatatgtatgtgattctctagtactggaattccggaatcatggagcgcacttaattcagctttagtaaatactgccaaatggttttctaaagtgattgtaccagtttgtacttccaccaggtgtgtatgaaagctgagttgctccacattgttgccagaattggctactatctgtctttttaatctgggatgtagagatactattacattgtcgttttaatttgtattccatggtgactaatatttgaaaatccttgcatgtttgtcattcatatatgcttttgtcactgcctgttcaaatctttgcccatttttcttttgggctgtctttttcttattgtgatataggagttctttatatattgtggatatgaatcttaaatatgaatttacttaaaacttccttcctaagtggcctgccttttaaccctcttaatagtatgatttgatgaatagagttttaattttaatatagcctaacttatttttttcatttatagttaacacttctgtgtcctgcttaagatgtttttgccaatagcctacttcaagatcataaagatattttcttatggttttttttttcctgaaaactttattagtttacatttcatgagattttggatatattttaaagtaataggcagccaggattcctattggctttgaaaggtggtgtgagggaaagagaccaaatatatcgaatactacttcccctcatccaccctaatttaataaatgatagctttattatcctattattttggaaattacaatataaaaataagacactagattgtaagcaacttgaggcaaagactgtgcttcatgagctttgtatgtccaggtcccaggacagtgactagtgcaacaatggcattcaataaatattaatgaatatatcctcatttcagaaaatttggcaagtaggcaaggatataaagagggaaaatgtaaaaatatcaccatattttcattattctgataagtaacattttgatatttttcctttagtgtgttatgttttttctctaaacatggttgtgatcacatcgtacatataattttgcgtaccgaatttctgcttaccataagaccaaaagccctcattgtaaatattttaatgcctctataatatttgatgaaatgtatgttgcataatttggttaatcgtttcattaatgttgaacattcgtttccttttttcctttataattaacactattatgcacatctttgtgcagatttttatctatgtttctaattatttccttaagatagatattgaaagtggaattactgttaaatagattttcagaaacactataccaatttatagtttctattagtggtatacaaaagacccatttcactgtatccttgcttatattaagtaatttttgttacttgctaggaagaatagatctcgctttggttctaatatagtaagactaaacattcttcatatgactaaaagcccatatatattttctcttttgcaaacagtctgttcatgtcattttgctaactggtctattagattcttcatgttattaaattgatttctattaatgggtgatataggcattctaaatttattgtatattataaaatttttcctgtttactttttagtattgcatatattataatatttacatggataatcagtttctttcctccctccccatgactcttctttctttgaatagacaagaagtctatttatgctggttattcttgctctcccatgtccattccttgcccttctctgctttgatctgtgcccagggagactggcccctttatgggctgaattccctagagttctggtttctggaaggttttggtcaattggtgacataggcaggggattctcaggtaggagacagaggctgggatattgattcctcctgttccttcctgctttgccaggtgttggcaatggtgagctcctttacagctaaagttcctttcaggtggctcttttcccctggttccaactctcatggggcattgattggtaaccttttcttccctcacccatttaggcctaggagtagtaacggcttcctgctgttactagttcctaggtgccacaacatccctggctggctgccttaaccgtgcccactgttttgtaaataccccttccttaaattctttttttggagacagaatctcactctgttgcctaggatggagtgcagaggtgcaatctttgctcactgcaacctccgcctcctgggttcaagctattctcctgcctcatcctcccaagtaactgggattacaggcacatgccacacacctggctaattttgcgggtgtgtatttttagcagagacaggatttcaccatgttggccaggctggttttgaactcctgacctcaaatgatccacccgccttggcctcccaaagtgttgggattacaggtgtgagccagtgtgcccagccccttaaattctttacataaaactctttcacatataccatctatttcttgctgggaccctgactgaaacaatatttaactatattttcatctagcttcttctaggaaagcactctgaagccaagttgaaacattatactctcaggcagtagtagagatcaacctcttaaaaccaaatccatgggcccaggagtatggtaagaatattttgcaatttataaaggtctattttttcataagtaaataaggtactgctttcagatgcatttctcttcacattatactgactttgagggcatgattatgaagattttaatgttaatagtaaaataaacacttttaaaaagtgtatcaaggtatttattaccaatattatagttattgttaaatgctgctcacattgatacttggtgctcaaagcctttaagctcccaccagaagttttgttgtttacagctaattagagaagatcgctaatttcctgatttaccaccatatataaagcattttagctcagggacagctgaagttaggaagccaatttgtattataactaagttctgatcaaggaaacagctcttgatttagttattacctttattttttatggtgaattccaagaacgtcaagaaatgttgtgcacgaattcaactccttagattagatcatctagctttgtgcactttgtgggtacacaaggacaatagtatcttagccagaatagctggttcctcttgactcaaagtggctgtagaaatagtgctgaaagtcccattttccataaacagttctcctagcagaccaggagagtttgaaattttaccactcatgagtcactcctttcctataaaagcacggaatcagtcttgtttcacttcacctggaataaattgaatgttaacttggactctataggtatagaagtcattagggctagaagcacagttttagaaatagtcttggcaagcaataaatctagagtttattggtgacagacttcagcagttatatctatgtgggatttccctgaggaaatatttctttcatcctgagaagcatctctggagtcagaaaaatttgggtttgaattctgtttctgacatttatctgtgtgacattggacgagctacttaatccctctaagcatctgttttcctgtaaaataagagtaataatactgcctgccttaaagattgttaaaaaaaattaaacaagataatagtaagtgtttaacacaatacctagcacataacaagtgtattgcaaaaatccaacatgaccgtacttgattttaaaagccttcaggggtgtctatgtgtatatcacactttagaaacgttttaaaaaagcctttagaggtggcatcctaatagtcaagcatatcaggacgatactaaatcaaagacacgtctttgtctagtaaactgcacggctacacttcacttttcagagtagagaataaaaacaaaacaaaacaaaactttacggagtattaagaatgtcaaaagtatttcgggcaataatttttgaaaaattaacatacattgtggaattctttggttatctttctactttagaaggctgaatgttcaaagatttgtctttggaaattaatgaaaaccaaattttggatcattactctagcattatatttcttaatcctatctcacaatcgtataaaaataaagggcaccaaagaagtggctttctctgtattgccttctgctcactagagattattttctggtaaacatttaggattaagctgtttttacactcgtgtttatggagaatgctaatcattacctgaatacaaatcatgacttgaatacaccgtctaacaggtaaattccgcctagttatgcatagctggctttttttggaagttgtcagaaggaaagcattggtgttataggacaataaagttcatatctagcaagataaagttatcttaatgcttcccaaattgtgtgggaccctaacaatcaatgctttaagtggcatttaaaaggaaagaaaagaacataaagacacttgaagtttctaaaatacaataatacttaatagatcatgacttttgttcccataggataaaaataaacaaggcatttttttagaagcaagttcttcagcttccgtgattaaacaggtgatcctgccatactgggggcagatgtcatgccaaaaggcctttgcagcattgtaaaggctcaaactgttagtgtgttaccagtatttgtgattaatcaggtcccctcccctctccccctggcaatcagggagcgttttctaatccctgctgattccctatctttttaatcataaagaacaatctgtcaaggaaaaaagggttttctctctagtccctgctttactgccttttgccactctgtcccagcagccattgtaaaagactatctagctatgtagatgtgacggtagctggtttttcataaaatcttatgactttctcccaatcatatgaagtctgctgctttacaaactacccactcttctctttatccggaggtcctgtgaaaccgaaatgacattcagtcgtttctatagcaacacgttctaagcatgggattagaaaaaaatgaacatttttaaacgcaggaactgttttctgaaaccaagaaagattagttaactcaagcaacattattgtaggcctactatgcatccagcactatgctaatcactataaaaaatctctcaaccacttagcagagtctagaattaattttggactgacatgtaaaataatttcactctagttattatcagttttatccttgggaatcttctcttcacgtatttggctttcttgttttctttacagaacacatacactaagtctgcaaaccacaataatatggttggaaaatgctttccttatttccatgcattctaaactttttagactattatgccatcattctttttgttgggaaaaatgctgagtttcagatgggcaagaacatgaaaataaaacattgtgtgtgctattatacaaaatgtcacagaatatcatacatatttattttacagccactcttcccagcctatccatctaattactttatggccatgccattcatgagcaatatagtcattctaaaatccataacaataaaaactttattacatgtcacctcatatttttatacagatacatatttttacatttatggctagagatactttataccaaggcaatgacttggagaattaatattctaattaaaaagttttatagttttggaaatcagaaagcactgtttgcaaacacctgaaatctgtggtattgaagcaaaacatcagaatctggtggtataagctctaggacactaaacaatatgttcattttgtactttgcagatccactagcttcttttctgtttacataataacaactcttcacaaagcttagctaaagccaaagcaaataaactaaacttgggaataaaaagtgtaagaggcaacagccttcatcttgtggaagcctacagcattttatttattttaaaattatgctttcataactaacaaaaatctcaatttgatgaaaagcacaattatttttgatcttcatatcagcctaccatttctttgcaaattagcttttatcttcatatcagcctaccatttctttgcaatgttttaaaagttaattttattaatgtactggtgttcacacattagtaaaatattgttcatttttcttggttatctttgtttccatattattatctttgttttgtttccataatatgaaaatgggtgattgaaataggtttcaatcattttcccttatttcccacctgagattcacgtcactgcaaatgctgaacctgaaaaatttgatgatggaggttatttttaactgaacacttgcatttctgaccctcagcaaaagactgtgtgtgtctgtataaataactgtataataatataatgtgatgtacaaatcttatatcactgagcttcagttagccccatctgttaagcagaagtatgatctaccttaaagggctgttatgaagattagaaaattagaaattttatatattaatatatagctgacacaaaataggggcaaaaaataataacaattattgttattgttgcaggaaaagagttcaataaaatggccttaactggtataagaagttacaattgttaaaaggagattcagctgtgatagcaaaagagaaagaaaatgaaaaagttgtcctggctcatctctggaaagacatgatatttcataacctcaaggtgtttgcttctgacctataacttcaattatagaccaggttatccaaaagttctccttattaacaaggtatctgtttttaccaggtgtctgttattaattagttagtatataatttaatgcaattaaccaaagcacctcttatgcctagaacatagcaggtggtttacttctttcttatgacatattcaagactcatggttttcccatttttagagtcaaaaacataaattcctccttttgctttcctgcgctaacatatccacctcacacacctgtttactctttgtttgcagggaaatgtgtacatctgctagggcgtgatctcgatgatgaggtgacatatgggatgtcattccattatttaaagaacaaattccaaagatcaaacttttctccccacacttgtgagtgatacatgggtcttctcagggacattaaaatggagctagtctcactgatttcatggacatttagcatacaattattgagttacctgctgaaatctcttcatacatatctggtttcaccctaggttatgaatatccatgcagactatttttccaagcttctacgcaactaaccttggcacttacccccagctcaggcagcaagcaaattattctggcttgatgtccatctgatggtttactcttgctacctcctactccctactataaccacaaatgacctcctccccacttgctctcattcttaccagaagttttcagttaacagctcactactaagccagtttccttcttaaagtatatatatccttttaaaatttccagtcttgttactctctctcttcctcttcaatttcttgtcctgttgtcacaagatctcttcttagctcaccaaattatcttctcttccctttctcttttattccatttatgaacaagacaccaacttctaccacaacaacagaacaaaacaacccctagcttcaaagagaacaaaaaaaccccaaaataaattaaaaatggctttaatgcttagagttgcagggacaagaaaaaccacattcttttaaaatgaaattagatgtcataaaggactatgaactagtaagagttccccgaagtccccttccgaatctcacaaaagactccatctccttcttcatctggctttttgttaataaccaatgtccaatataaatagaaacattgctttgttttgattgtattgctctttcatttgtgcaaatggtagtatttctattgtatcaatgataaactttttcaggcaagcctgagatggcagattacaacattatttctatgggaacacccattcctaattggaaacaatcagattaccaacagagagttcataaactgagagctgcctgcaatgagaactgatttacactctggtttctaatttagaaacaatttcactgtgctagtttctccttttgcacaaagatttaggatggtgcagtagggtaaggaaaaatggcttcccttcagtctgctaggttctttggctgggctacaaattaaattgccataaaacagattaataggagaaaaccatatttaataacatgtatgcatgggagtcccataaaatatgggattggaagaaggatcagatgattatatagcatcctgaggtacagaaaggagtaggggcttggcacttccaggggatggtggcaacacaagcaatgggaggataaggggagacaatgtatggtgaataaatggttgtcttacgcagacataaggtctctcacgtaatacaagttatctgggagcagccctcagaaaaataggtgttaatctgtggggtcatggtgtccacctccaatctcctctcctgtgatcgaagttaatcttccttggttgataagattcccagggaggggattcatgacaatttagttccttttgggggctgtctttaggaagactaaagggagctcagaggaagcctctgccggcatccactgttccccaagtgtcctcagttcaaagcaataaacataccaatgtgtcatattttggggtggcatttcctgaatccctttagtgaaaaaaggagaaaataagaataggcacctcatagaaaaatttacctctatttcaaataatgcatattgggaaattgaattgaatgatgaagcaaataaaatatttatttattgtatgtaatatagatgagtcaatgtcgctttgagaaatttaactttttaatttgctaacttggtgtttgtattgcattagcaattgcaaatgaatattattctcttgcaagtgtcaaaaagataatgttgtggggaaagcagctccaactgttactcaggcatggctggaaaaagcttgcactcttcattgtctttttctagtcactgaatcgccagctttatttctatggtggcaggtataccaaaatcagaatgggattacactcacatattagtatatacagcaacctgcctgtgtgaaatatatgcaaatcttcccctacataccatgtagttaactctacaatgaacaatatataaatattgtgggtaaagtaaatcaatataaaatcatacattcacattcacaatattttaaaaatatcaaaatggttttggctaagaacataaaacattttatttttggaaaaggaagtctgtttcaatagtcttgttaaaaatactaccatataaactatgcacttaagatacaaaaaaagagtaacacttaacttcataagaaatatcaaaccatttattataaattattcattaaacgtagtgaattattttatatgggaaaattctctttgaaataatatttgtatggcttcctaaaatcagacaaggttagctacacttgagtttcttactttcttgcatataagtcagaaatattctttgaaaagctcaaatacaagataaggtgtattctccacatctctgtgtgtgtgtgtcgcatgcatgcacacacattatctccacatacacacacatatacacacacacacacacacgcacacatccttattgttattttcttctcatcttctaaatgtatttatttgactcccagtagaagacaactgtaagctacagggaaaaaatgcaattaaatttatgttcagaagaacataaacaatgggaatatgttctgagaaattcatcattaggtgattttgcattatgtgaatatcatagagagtacttacacaaatgtagctagtataacctactacatacctaggctatatggtctagtggattgctcctaggctacaaatctgtacagatgttactgtactgaatactacaggtgactgtaacacatgttacgtatttgtgtatctacacatagaaaaggtacaataaaaatacagtgtagaagataaacaatggtacatgtgtatggacacttaccatagatagagattgcaagatgaaagttgctgtgggtgagtcagtgagtcaatggtgaatgaatgtgaaggcctaggacattgctgtaatcttctgtagactttatatacactgtacacataggctactctaaatttattttaacaaattttcttcaataataaattaatcttagcttccttaacatttgtactttgtaaacttttttttaaactttctcttttgtaataacacttagcttaaaacacacattgcatagctgtacgaaaatattttctttatatccttattttataaatttgtatttttaattttttttttactttttaagctttatcattaaaaactaagacataaacacacagattagcttaggtatacacagggtcagggtcgtcaatatcactgtcttccacctccccgtactgtcccactagaaggtcttcaaggagcattaacacacatgaagctgtttatctcctataacaatgtcttctttaggaatacttactgaaggaactgcctgaggccattttacagctaactaaaaaaaaaataagtctaagaagtacactctaaaataatgataaaaaatatggtattggagctcagaaaacagtacctcaaaaggaaggcctcagaagcaaaaggttctccctgatcttttgccatcctgtttctggccactcattctctcttaaggctggccattgaaactagaatcccttcttcccaaggcacgtcatagaaaccagaacccttttccccaaagccagcttaaaaatattactttaacttaaaataaaattttaaaatattactttaactcccacctcacccctgcctttctgtataaaaattggccataaaaaattatctcacctaccttgtttgactgtaggtcataagaccccccattctagagaggctcctgccccttacccagaagtaaggaacgctgcacagaaaggccaggaagaatctaaacagacaggccttactgggttctcccactcagtctattagcattagatcataccctttttgtccaatcatatttgcacatgctatacatactttgttgaaccaaagtataaaaatggactgtttccttcatctttgtgtcttcattctaaaggctcccaagtcatgtaaaattataataaatttgtatttgccttttttattaatctgctgttttgtcagttgatttccatcaaaccttcagagggtgaaggagaagttttccctgggtccctacaatagtatagataaatacataaaccagtaacatagtcatttactaccactataaagtattatgtactgtatatatttgtatgtgctatacttttatatgactggcaaagcaataggtttatttacagcagcatcaccacaaacatatgagcaatgcattttgctctggcattatgatggctacaacatcacgaggtcataggaatttttcagctccattacaatcttataggaccactagtgtcattaactggaatgttgttgtgtggcacttgaccatatatgttttaatgttgaagagtgaattaaattaataacagggaatttctttgctttggtttacttaaatgtgaaaatggattgctatttaagcagagtgtacaaaataaatacttttttcacattctagtaaaatggccagtttaataatattttgaacaaaaaaaattccccccagaccaaggtgttttttatttaatagggaaaaatagtgctaaaatttcaaatgattttttttttctttcttttctgtcactcctctggctctttttcccaatgaatgaatgaacctgggaagaattatcagtctgatacgtggtaagtaagtggtttctaggtatttaatatgccttttcctgataactaatttgccagatagattttccaaaaatggttgcaacaatatctcccatccctgattctcttcttaaatatgactttgacaacttttctatcaagaggtagggtctatatccccttcccttgaaactaagagggtctgtggttaaggcagaactgacactcagtgacttttgagctaagtcataaaagatgatacaacttatggctggttctgactcaatcttggaacccagccatcatgttgtgaagaatctcaggacatttacagaggcttcataggtttctggcagacagctccagcttacaacagcatcaaccaacagacttgtgagtgaagatggctcctgaaggtatcagccccccgctgtccagtcacctcccagcttttgagtctttccagccgagaccccagacaccaaggcacagagacaaacgtctgcattgtaacctgtccaaaattctgacccacagagttcttggcataatataatgattgttttatgtcactaaagtttggagtggcttgtcacattgcaataaaaaattgcaacaacgaaggaggttgattatcttttcatgcttattgatcatttgcatttcttctgtgtactgtctattcacaaattttgcctgtttgactcttgggttatttgtcttgctcatattttctgcatattaatcctacttttgttacctatattgcaaatgtattcaaccagttgcttgctaggtaatagagaaatttgagttttatgtatccgttcattgttttcattttttagtcttggggttttgtatctttttttttttttttttttttttttttgagacgacggagtctctctctgtcacccaggctggagtgcagtggcgtgatctccgctcactgcaagctctgcctcccgggttcatgctgttttcctgcctcagcctcccaaatagctgggaccacaggcgcccgccaccatgcccagctaattttttttttttttgtattttttagtagagacggggtttcactgtgttagccaggatggtctcgatctcctgacctcgtgatccgccagcctcggcctcccgaagtgctgggattacaggcgtgagccactgtgcccggccggttttgtgtcttttttagaaaaaggctttcccatttgaagaatataaaaatatcctatactttcttctagcacttttataccttttcttattcatcataagatcagtctctgactctatcttgaatttattattttacatggtatgggacagtgaaaatctaactctttttagatggatagtcagttgtctctgtaccatttatttaaatcatccattctttttccattgatttgaaatgcctcctttatgaactaaattcttaaataaatatatgtctatttctagactgtctattctgaaccattaaactgtttgatcattactacaaaagtgccattttattttaatttatatagctttttgatatgttctgatatccagtagaacgcatagtatagtctaatttttcttcccccagaaatatctttgcagattttaagaatttcgtctttcagataaatttcagaataaactcgccaagtgccttgcttggcacttaagtcacagccttgctttgacttaataaattaatgtgtagcaaactgacatatttattatgtcttcttgtatattaacatggtatatttccccatatatccaggtcattttgtagatcctttagcaaagttttagaagttttcttcatctactcacgtacaattattttaggcttattcctaggtagtctgttgttttcgttattcttgtggatagttttttaaaaatacaatattttcaaattggccattgctgaagtatagtaaaactactgaattatgtatatatttgtatgtgtatttatatatatatacatattaaaagtattttttgttttttatattcagcttttaaaaaattcttttattagtgataataggctttcagttgattctccttgaattttccctctaattgtagatgaccgtccctttgaattatagattacactaggtttctgtgattaaacaaatattaagatgatatatcaaacagagacagttttaaagtacaaattatatatcacttaaaagtttctaaattttagaaaaatatttatcaatgttttctgaaatctactttatacttagttacctagaacaggggttggtaaactaccatccatgggccaaatctgacccctgtctggtttttttatatccccccagctgatataatggtctttaaatttttaagtgattgaaaaatacaaaaataacaattttttggtacatacaaattatatgaagttcaaatttcagtatccataaataaagttttattggaaccagccatgctctttctttcatatatatatctattatctatgatcactttcccactacgatggcagagtagagtagttgtgacatattgactgtatatgttgcttttattgctttgcagtgctgctgggtacactacaaatcatactgacatagttatcatttgattgtgttttacatgccacgttgtactgtgacatcttattttttaaactgccatttcatacctatcatctcaaaacagtaaaagaagagaaaagtggacttcaaatgacaggtacagtggagtgtagatgactgttatcaaattagatggcaaagcattgtgtctattgtgcatgacactttggctatgctaaaaaaatacaatatatacaggcatttctaggttaaacactcatcacattattctcaactcaccagtaaccaatagtcatagaaataaaaaattaaattgaatatatcatcacagtagaattttttcacaaaaataaaaagtgcaaataacactgcatcaaaaataattttctgagtagctcatttgtttcccaagcaaggaaagctatttactgaggatgaataaattaaattgtgtttgattatagcagttgaataaattatccagatagaacaaacctgtttaagactattagctttttggtgagaacagttgcttgaatagttgagaatactggaagcaatggcaattgttgattaaaagacaaggcaagtaattttgagtggttttccttgcatcttgatgagttgacagatatagctgataccactcagttattatttatttgaggagtcaattctgagtctacagtgattaaagaattagcctaatgaatagcctgcattgtaaaactataggtgacaacatttccaaaaaaactgagagaacacaaattctgcacaacctgaaggggaatcttctaagatgtgttccaatagacggtggtaaaatatttattttaaagcagaaaaagggtttaattgtacaaattcatatagcttttcaaaatgtaaggcatcttaaacctatagtgactcatattattcatcagcggtgctttgtggaacatctttaaatctatcatgtgtaattgaaacagtagtgtcaatggtgatattcatttacttttgcggacttaaccatcattagtcctgtaaagttttgttagaatagaatctgaatattctacttctctatcacatggcagaaacaattgctaagtagtagtaacatttcattatgatttgtttgagctcagggccaagattgaaatttttatgaatgagatgcaccactatcacctataattgaatactgaatagttttggaaatgagctttcctacagactgttaatgtttctttaaaaattcaacctaaaattgttaggcaaaacagcacttacaagtgaaatttatactgtggtaaagtcatttcagtgacaactaatgttgtttgaatcacatgtaatgtcaaactgctttctacatttcctgtgctgtcaaaagttaaaacaagaagcaagacctccatttccacacaaacgtgcagcagatatatcttttgagttcaaactacaattccagcagtggatttttttggactttgatgcaagtgcaaatgaaatttccttatttcaaaatccatttaactgtgcaattgaggagcttccacctacccttcaattggaagtaattaatataatgacatgctaaaaggcaaataccaagagaagaatctaatagaattctttaagtgctttttaagtaatgattgtgctaaattaaaatcatatgttcatcaacagatattagtatttgacagtatctatttgtgtgaaaagatattttcaaagacaaaatatgtaaaacctcattatgaatcagcattaacagatgggcatgggcaattgattctgatgataggaagcactaactttgaaccccaattaagtgaaatgttatcactctcccacaataaaagaattcaatttttctcatcagtagacctatattatagaaaattatacttaactattattatcaaattttccatttttgtcaataaagatttatagaaatttgttttctatcttgtcatgtaattgcccacataatatccttgattttgactcttggcctaaaaagtctaacatatttactttttgggtcttaacagaaaaatgttgccaatccctgacatagactattctcttatgtcctttattgtcaaaggtgtctactaaagataattctcaaaataattgtataagttcatgtttgttgagtgcttactatgtgcaaagctgtttaagttcagagactttctcaaggtcaaacactggtaaatgaattaaccattatttagatggttaacaatgatatagatagtactgtagttataattcccattttacacatgaaaaaacttaggctcagagaggctaagtaattcctcaaagccacacaacctaggctttgcagccaggaagatgagattaaatcatgcttaattcccttaccagtgtatgaccttgggaaaggctgtgaacttcaatttctctacactataaattgaaaattatagtactgactatatcatagggttgatttcaatattagattaattactatatagaaagcacttagaacaactatagctctagtgtggagtagtcagaaatggcctggaagttcatttttagtaaagagattaataaaatagtttattatgtaccaggagttgatggagaacagttcccaattcagctgtcaatttgagcttttcgcttatgaaatctatgctattgagttgacgtttgttaaggaaaagaacctaatgtctgataaacaggcaaaaattaactattacatttaaatgtgactattgcagatgtactaagtagttgagaaagccagttggggtcatactcacttaggcttacacctagctttgcctccttgttagctgtgtgaccttggtcaaatcacttaacctttctgagctgaggtaccctcctctataaaatgtggattttaagtaggctattatagaggatgatgtgaggattttaaaagaccatgcatcaaaagtacctaagatgaagcctgatttaagaatgagctcagcaaatgctagctcatttccttggattagcctttctacactgacccaaggcttgcaaggcaaagcaaaactaaataaaagcaaaatgaagttaaaaagcccaaacaaataaaaaccaatttgttaattgggtgttggtggataaaaagactctgaaagtacatccagtcaaatttgaatttcaggtaaactatgaaattatttgtagtataagtatataagtatgtagtgtaagtatcccaagcattgcatgggatatacttacactcactaaattcttcactgtttattcaaaattccaatttaactggatgtcaggtatttctatttattaaacccggcagcctagacatggtagaatttagtaagcccagacatgacagactcctgaatagccaaggcacagaattcaaaagagtcaaatgtgtttccaacttgctaactgcaaaagcatcaaggaaaaggttgaccccaccctctctgtctctgccaagcaaagagcccagatgggaaaccccaggtgagtgatttagcctcctgtgcatactctatgggatcctggtgcagaggttgctgggaaaaccgtggcagcctgccctaggttttccttcgggtggggccctgtggttatggtgtggtgactctttgtcacggtgcccctgccacgccctgcttagtccacctggtggttgggggtaggggagaagagaagttacaggcagaaaaaaaggacttatcaatgtaacatatttcttaggtggtttgtgcattgctgtttgggcttgcaaaactttaattattactttgatgcagagtggctgcagattgtcactgccaggcctgatttaatagcctgcttgcacaaagtccgacagagattgcttttgttgcactttctaacagctcgtgatggtggcttttttacgttaaggaggaaactctgtggttaaactgtagcctaggtatttttagagccgttaccatgttaaccgaaatttcgtacatttcacctgcaggatatgcagtcgtgcttagggccttccttaaactctaacaaaaaatataatttaacagttgttaatactgtgcttaggaccaactccatgttatcagaaaagctactgaccaaatactggactgctaagaatcctttttttggatgggtggtactgtgccattagagagtatttttttttccttgatataaaacgagttgaaggaacataaccaaaaggctaaaattggttagttctaaaggtcagagcctgaaggcagtgacccatttgttaatcattaagcttttctaagccgtctctgacagaattctggctttctgccacttctctggtcattttaaactgcaaattcttgtactgtttcagtttttaagtaggtttcaaaggttatgagaaaggcataacttgttagctatttttccttatcaaacgtctttagggttttggaaggcagagctgttctgtgttaagagaatcctcacagcatacccagccatacagcatttaaagatggactcttgggtcctctgaaaagggtggatttctagctatcattcccatgttacttagtttccatagataagcaggatgtgagggctgaggacacccacttagccattaggtattagttcccaaatcactgctatctcagggtagttgtctccaataatcccagcactgaaagttcaaaaaacaggagcaaaataaccacaatgtatttatcatcttctgtcatcagttataaagtggaagtactttaaaatattttgaatgcatttttgtaaagcccagtgaggttccagtgctatgacgtttcattgccagaaaactcaatgccagtttatgctctagtccatctgaataaaaagtgatctgtacacccaaaacacataaacagaactaaattttatgtagccaagggacattaagctgctaaaacatttgcttcaatattgaacatggaatagctgtcctctatttctcaagggaaaaaatatacagtcaaaccttgcttatccataacccaaacttccggaagccttaagtatttggaactgctccaaacccagaagaggggaggagtgagaggaatagagtgggggtgggagaagtggggagcagagagagacagagaatgaactagcggaaagcaagcaagtcagcttttagaagtagacctgaagccctagcaacactgaaaagagacctggagcttacatctgattggctttccagccagaaggaatagagagctctgattggctggtgatgatgtctccaaataaccagcctttttcaggaaagcaaatttatgtggcagaaaggacaagagacagaagaagcacgcaagaagaaaagcgaggagaacagagcaaaaaaaaaaaaaaaaaaaaaaggaagattatttgttacagtggtggagactgagacaaaaatgagaataacaagcctatttacgtaactgcttacagtttacaaagtgcttttacatgtaatcattgatattgtctttacaaagacctgcagggctcccagaagttaaatggcatgccccaggtcacccagctagtaagaaaaatagtgcatgtcttctggctaaaaatctaacacttttgatatggagcaggtgttgtggagataatgatttagagttgtcctgtaggacagagggaagcaaatgctctgacagcagaaaagaaaatcagaaggcacgtcagcctgtagtttagcgggcaatgcagacaggagtgaagggctccctgttcttcacgaccacacaccttgaaaacatagatataggaaacatctctgtgggtatttggaaggggagatggttgtggtacaaatgaaacctatgtctagagggctcagagggcagtcctgaatatatttccctggggtgtatcacagtcgcctttcatttaacacgtagaagttggatacctaattattccttccatctatccttgaaagctgttccttcctcaggcttagtcgacaacataaccattcacccagttgctcaagctaagaacctgtaagtcatctttgtcttaattttctttccatgtttaatttatcagcaagtcctgtagattctacttctaaaacacaccttgaataaggctactctgttcatctccataatcaccattgttttctccttctgagccactgcaataacttgctatttggtttcaatactttctggcaccctgtcttccccagctcttgcctccttcccttgaaatccattctctggactatgccatcctgcttaaaacatgcctgagaataattcaaaatccttcccaggatctggccccagtttaatttgcctcactctgcctaggactcactgttctagctatggaggcctcctttttgttatcagaacacagcacagtctttccagctgaagagacttaaatattttgctggtccctgtctccatgttatcacatggctagctctttctcctatctcatgctatctacacagacagtcctactctcacaagctgtgtgagagttcccttcattctcatagaacctttttattaactttctgtgacctctcaaactgaaattacttatgtttttatttgattccttgtttatcatcgtctttttatatgacttccccctactagtaatcaaactccattaagacaaggatcaggtcaattgccctcatcactgtatccccagagcttacaacgtggtacacaggagatactcaataactatgtgtcgaatgaataagtgaataaatatcagggaattaacataccctacatgttacatagtaccatgcatcagtggagccatggatatgagacactgtgtttcctgtttgtaacctgttatttgttaattcctgtcagagttgagagctctgatagtagctgccatcatctggggagttctatggaatcttgccaccatgagttctggaaaagggaatctgtttgtgttgggacttgagggatggtataaattaactcccaaggtttattagtagtaaacaattaaaatccaccctgaaattggagctttactaaagatggctattttgtagcatgtaggaaattacgatattggtttacctcctaggattcaaaaagcattcattctcttttggagccagaaaaggagaggtatgtctcctaacagaactgtgctgggtttttttttgttattgttgttttctttttttgacagtctgtggagctcacacattggccataataaagcctgctatctatttttgatttgtcaaagttgtgcttgagagtgattaacatacccttagcaaaatgaatcattctatagagatttaaaagtcacgatggaataaatatcttggtcaaaggtattgctgctttaattacattcatttgtttcaatatttcggttttagggatttcttaactgagttgttaaggatccttttagggatttcttaactgagttgttaaggatccttttgaaagtgaagtttaccatggtgccctctggtggaatgaaattcgcacagtttttaaagctaaagccctatctagtgagaatgcatacagaaataaaaggagcaacattaaatacaaatgtccaaaaactataagcagggtactcttgctattgggggactacaagatatacctgcctcagaatatttacagattcagggatagggcatgtagttgctataaaggaagagcaatgacataaatacatacaattccaaatccattagaaaatgagggccagaagccacagcatttcatatcatctggcaacactgacactgactaattaggtattatattgagaaagtcagaagaaggtgatggcaattacagcatttgcaacaatattcataaatagctaggaacacaagggggaaatacaatttggttgtggtctatcaagaaccagtggatattcatttgataggacttttgtaattaggctcaccatcaaagctgataaaatcatcaaaatggtaagtgtcccagtgttggttccttgaaactgtgttgtgaccagacttagtgactccttgataaagcagctttcacgtgtcttcacaaggaaataaagtgaaagtctctgggacgctatctgggtcacacaccacagggatcctgctcagaggatttagaacattggaccagctcactaaggaaagatgtcaaggcccttctttgaggacctaaggaagtttttaatattcgttcgtctgaatgcactaaataaaactctcattccaaataagataaaagaggggaaaaaagtgtttgagcatccaatcccccaaagtgtctgcaaattatttagtattatttcagtactcaaacttcctgaaaggtggaatgtggggcagaggagtagtgagcagggaccatagcacacatgcatttagtcagcttgttggttttcttattggggacctttctttgaaacttggtgcacctcagattttaaaaaacccaaagccaaaaaacaactaacagctggctcttctaaagcagtggctctcagaggaatggtactgccttctaggggatattttggaagtttatgagggccatttttcttgggaagggtgtctcaaagtataaattattatgggactgttaactgacattcagtgggtagtagtcagggaggtaaggggaagttccatatcatgttagattttactgtcccaccaactattcatgtagatttttaaaaaatctgtatgtaatgatttaagcctaggaccaaattcaatcttacataaaaaattaaatatttcttttcatggttttaatagacacctaatttcccataaatgcaaatccaatgtaaactaactgaagactatactttgtttcatttgaaccttactgagaattgttaatcatttttgaaaattataatatcaatatccatggcacatatgacatttgaatcctctgaaaatataactgcaataatttgtaacatcccaattcaaagtgattatacaaacaggtgtgtctgattatgtcttccagtgtagttgtccccaagcattttcaattattattatgatattcctttcttcttctttaaattacaattaggcaatcatattagtaattttaaaataatgtgtactggccaggaatagtggctcatgcctgtaatcccagcactttgggagttccgaggccggtggatcacaaggtcaagaggccgagaccatcctggccaacatggtgaaaccccatctctactaaaaatacaaaaattagccgggcatggtggtaggcacctgtagtcccagctacttgggaggctgaggcaggagaattgcttgaacccaggaggtggaggttgcagtaagccaaggtcgcgccactgcactccagcctggcgacagagcgagactccgtctaaaaaacaaaaaaatgtcttggtaggttatgttatccatgaatttcattttagaatagttagagatgttattaaaaatatttgttattaaaagaggacatggggtgataatgaaaatggcaaaataagggactctgaaaaccctctcctccatacaagcaataaaaatactggcaaaaattgtcagtgtaaactttttcagaactctggaaattaatcaaagactagcagaaatcaggtaagcttttatttaaaaaaatggctgaatgtcagtaaaaactaagcttttttgtcttttactctgctcttttctcattctccctcccctgcccccagctctgcaataacctgggaaaccaacaacttgcaatcatgataaacactggcagtctggcagcccccggaggggatagaacagggttagcgctctctccaaactccatttccagagaactatcattatttgacctgtctgatggttccctgaaatattccactcataatattgtctctatgtgacttgacttagagttcacccaatgtgaatatttttcttaacagaaatgattttcaattatttgtagaaaagactgagtggcaattgtttcacatcactgttgcctgaggcagtacataagagttgaagcaaataatcagcttaccaaaagcttaaaaggagaagctgtggaaagatacgtccacaggatgatttgaaaagcacagacataatgctgggaaactagaagtacaagttcatgtgtagggatgtgagcatactcagtgctatctgcatgctcagctaagacctgagaaagatctaaattctcaactctgcctaaccttgtggctctatggaggcaggaagtgaaagtgaaggcagagtttcatactgcctgctggagtgttcaaggtgtgctccaaatgcacacagagcccttaggcaaagattggaggacttgtgagctccaggaatttaagaaaatctttgtccaatcattagctgaacactaagtcagctatcagagactccaatggccacctatgacaaagaaatcacatattaaataattagctcaaacaaaacaagcaccaactacaaacagcaactttcacaaaccctggggaggtaggagattctgatttcaagagttgcaacattttttaaaatgtagtttcaacaaaaaattaggagacattcaaagaaactaaaagtatggcacacatgcagtacaaaagcagtcaatataaactgtctctcaggcacatcaaaaagcttatccaccatgatcaagtgggcttcatccctgggatgcaaggctggttcaacatatgcaaatcaataaatgtaatccagcatataaacagaaccaaagacaaaaaccacatgattatctcaatagatgcagaaaaggcctctgacaaaacaaaattcaacaacccttcatgctaaaaactctcaataaattaggtattgatggaacgtatctcaaaataataagagctatttatgacaaacccacagccaatatcatactgaatgggcaaaaactggaagcagtccctttgaaaactggcacaagacagggatgccctctcttaccactcctattcaacatagtgttggaagttctggccagggcaatcaggcaggagaaagaaataaagggtattcaattaggaaaagaggaagtcaaattgtccctgtttgcagatgacatgattgtatatctagaaaaccccatcgtctcagcccaaaatctcctcaagctgataagcaacttcagcaaagtctcaggatacaaaatcaatgtacaaaaatcacaagcattcttatacaccaataacagacaaacagagagccaaatcatgagtgaactcccattcacaattgcttcaaagacaataaaatacctaggaatccaacttacaagggatgtgaaggacctcttcaaggagaactacaaaccactgctcaatgaagtaaaagaggatacaaacaaatggaagaacattccatgctcatgggtaggcagaatcaatatcgtgaaaatggccatactgcccaaggtaatttatagattcaatgccatccccatcaagctaccaatgactttcttcacagaattggaaaaaactactttaaagttcatatggaaccaaaaaagagcctgcattgccaagtcaatcttaagccaaaaggacaaagctggaggcatcacgctacctgacttcaaactatactacaaggctacagtaaccaaaacagcatcatactggtaccaaaacagagatatacaccaatggaacagaacagagccctgagaaataatgccgtatatctacaactatctgatctttgacaaacctgacaaaaacaagcaatggggaaaggattccctatttaataaatggtgctgggaaaactggctagccatatgtagaaagctgaaactggatcccttccttacaccttatacaaaaattaattcaaatggattaaagacttaaatgttagacctaaaaccataaaaaccctagaagaaaacataggcaataccattaaggacataggcatgggcaaggactttcatgtctaaaacaccaaaagcaatggcaacaaaaaccaaaattgacaaataggatctaattaaactaaagaacttctgcacaacaaaagaaactaccatcagagtgaacaggcaacctatagcatgggagaaaatttttgccacctactcatctcacaaagggctaatatccagaatctacaatgaactcaaacgaatttacaagaaaaaaacaaacaaccccatcaaaaagtgggcaaaggatatgaacaggcacttctcaaaagaagacattaatgcagccaaaaaacacatgaaaaaatgctcatcatcactggccatcagaaaaatgcaaatcaaaaccacaatgagataccatctcacgccagttagaatggcgttcattaaaaagtcaggaaacaacaggtgctggagagaatgtggagaaataggaacacttttacactgttggtgggactgtaaactagttcaaccattgtggaagtcagtgtggcgattcctcagggatctagaactagaaataccatttgacccagccatcccattactgggtatatacccaaaggattataaatcatgctgctataaagacacatgcacacgtatgtttatagcggcactattcacaatagcagatacttggaaccaacctaaatgtccaacaatgatagactggattaagaaaatgtggcacataaacaccatggaatactatgcagccataaaaattatgagttcatgtcctttgtagggacatggatgaaactggaaacaatcattctcagcaaactattgcaaggacaaaaaaccaaacaccgcatgttctcactcataggtgggaattgaacaatgagaacacatgtacacaggaaggggaacatcacacaccggggactgttgtggggtggggggacgggagagggatagcattaggagatatacctaatgctaaatgacgagttaatggatgcagcacaccaacatggcacatgtatacatatgtaacaaacctgcatgttgcgcacatgtaccctaaaacttaaagtataataataataaaattaaaaaaaaagtatcaagaactttaaaagatgaaaaaaaaaaaaaacctctctgaggaagcccagacattgtacttactagacaaagatttaaataagccattttagttgcattcaaagaattaaagaaaactatgtccgaggaactaaagacaagcatgagaatgattttgcatcaaatagagatcaataaatagatagaaatataaaatagagcaaaacagaaattctggaattgagaagtaaaataacagaagaaaaaattttactagaggggctcgatagaagatttgagcaggcagaataaagaatcagcaaacttgaagatgagtcaactgatgctatcaagtctgaggagcagaaggaaaaaagaatgaggaaaaatgaacaaagcctcagacatttggggaacaccatcaaatatatgcacagtgggagtcacaggagaggagagaaaggagtggaaagaatatatatataaataatggctaaaactttccagtttgataaaaaatcatgaatctacatccaacaaactcaacacactctatgtagaataaaatcagagagattcatacctatatgcatcatagtcaaaccactgaaatacaaagacaaagagaatcttgaagcagcaagaaagaagtgactcattatgttccagggattctcaataggattagcagctgatttctcatcagaaactatggtggtcagaatgcagtggcatgacatgcaaaaagctgagagaaaaaaacatctaccaagaattctacattcagcaaaactatccttcagaaatgaaggagaaatcaagacactttcaaataagcaaaaaaactgtggtaactcattggcagcaaatctgctcttcaaaaactactcaaggaagtccttcaggctaaaatgaaaggtcaatagactataatttgaatccatatgaagaaataaagaaaactggtaaagatacctaaaaagtaaatataaaagaaagcacaaatttctttctgtttgtagctctttatcggatttgaaagacaactttagaaagtaataattataaatctgtgttaatgtgtatacaatgtacaaagatgtaatttgtatgaccaaggaagcacaacaaaacagggagagactggagctatataggagcagaggtttggtatactattgaaattaagttcatattaatccaaactagattgttgtaaattaagatattaactgcaagccccaggttgactactaataaaataactttaaaaaatatattagtattaataatataataaatgacaagaaaattaaaatgatacactagaagaattctacttaataccaaagaaggcagtaatggagaaataggggaataaaaaatgacttaagacatatagaaaacaaatagcaaaatggcagacataaatcctatcttatcaggaattacattaaatgtaaattaattaaacgctgatttaaggcttagtttggcataatggattaaaaaaaaaaaaacctgatccaactctatgctctctataagaggtgcactttagatcctaggttgaaggtaaaaggttgggaaaagatataccatacaaacaaaaactaaaatagaactagagtggttacactaataccagaaaaaataaaatttaagaaaaaatcccttactagagacaagattattttataataataaaagggttaatccactaagaaaatataacaataatacacaaatgtgcaccaaacaacagggtcccaaaatacatgatgcaaaaacttacagaagtgaatggaaaaataatatttgaagacatcactttcccactttcaataatggatagaacagccagacagaagatcaataaagaaatagaggacttgaacaacactataaaccaattaaacctgacatgcatatacaaaatatttcactcaataacagcagaataatacattcttctcaagtgtacatgagacattctccaggatgaagcctgtgttaggccataaaaagaagtttcagtaaatttaaaagaattaaaatgataaaaagcatgttccctggtagcaatgaaatgatattagaaaccaataatagacagaaacatagacagaaatttggaaaatttacaaatacatgtgaattaagcaacacacacctaaataggacaaagatctaacaagggacgttagaaaatactttgaaataaatgaaaatgaaaacacaatataccaagccttactggatgtaggtaagcagtgcttagagtaaaatttgtaggtgtaaatgcttatattaaaagaaagaaagatcttaaatcaataatctgacattccaacttacaaaactagaaaaataagagcaaaataggcccaaagaaagcagaagaaaaaaaataataactattagaatacagataaacaaaatagagatagaaaacagagagatcaatgattcatagatccaacacaatcgctataaaatccctgctgcttttattttgcagaaattaacaagcttattttaaaagtcatatgaaaattcacacagctaaaatagccaatacaatcttgaaaaagaaaaaaaaaagtgaaggactcacacttcccaatttcaaaacttactacacagctacagaaatcaagacagtgtggtactggccataaggtagacatctagatcaatgaaataaaattgagagtccagaaataaacccatatatctatagtaaattgattttgactggggaccaagaccactcagtgggggaaataatggtctttttgacaaatggttctggggcaactggatatctacataaaaaagaatgaagccatgttttcgtacatgtttttaagattatttgggcatggcaaggccaacagatcagaagatgactgccattgcaaagacagtttgttatactcatagatcccaaaagaagaggcacaccacaccacggaaggccacacatgggagatccaggatcaacaagaggcagaggaaaagggaaaattgtgaacaagagccttaactgtaatttttgtgaaaggaataagtgagtcagggtaagcagatgtaggattggctactttgaataattttagtgggctttggagcataggggaagtccctagttgtatggtacctggccttaggcaattaaggtaggtggatagtggcccagagtgtgagagctggttaaagaagatggttgaggttaaaagctctggattgggtgattagcatttgaaagaaatcctcatgggctggtggtttactatatctaagaattgactaactctaaaagggtcagttcctccagcatcatcagggcccaagacactaaaacatcagaatatagaaaataaaagacatggttaatacaaggtggatatctactttacacggtctacaaaaatcaacccagaatagagcaaagatatgaatgtaagagcaaaaactataagactcttagaagaaaacaggcataaattttcaggaccttggcttaggcaatggtttgttaggtatcaacagaacaaacaaccaaaggggggcaaaaagataaattggacttcatcaaaattaaaaactttgtgcttcagagactagaaacaagaagttaaaaagtcaacacattgaatagtaaaatatttgcatatcatatatccaatagggaacttctatctaaaatacacaaagaactcttataattcaataataaaaacataaataacccaattaaacagtggacaaaaaatctgaatagatgttttttccaaagattataaacaaatggccaaaaagcacatgaaaagatgcttaacatcattagtcattagggaaatggaaatcaaaaccacaatggcatatcatttcatacctcctaggatggctaaaatcaaagagacaataacaagtactggcaggaatatagtgtcattggaaccctcatacattgccactgggaatataaatggtacaactcctttggaaaacaattcctcaaaaaattatacatagagttaccatataacttagtgatttcactcctaggtgtataccgaagacaactaaaaagaaatgttcagacagaaacttgtacatgaatgttcgtaaaatttttatagcaataatatttataatagccaaaaagttgaagcaacccaaatgtgcattaattgatgaatggataaacaattacggtatatccatacaatggaatattatgcagtcagaagaagcaatgaagtactcattcatgctataacatggatgatccttgaaaatattattctaagtgaaaaaaagcagacacacaagtccacaactgtattatacaaaacatccagaataggcaaatgcatagaaacaggaagtagattaatggttgccagaggtgggaatggagagtaactaccaatgggcatggagtttctttttgacgtgatgaaaatattctagaattatacagaggtgcttgttacacatctctgtgaatacataagggtgatttttatggtatgtgaattatatcccaatttttaaaaaaggacaatgggttggtattagctccctgtggttgctacttggtggcttaaaacaacagaaatttattttcttagagttctggagtctataagtcagcagtttcattgggtaaaaaccaagttgttggtagggttcactgtcccagaaggatctaagggagaagttgttccttgactcttccagcttccggtggctgtcagcattccttgccttgtggctatttcactcgaatctcttactctgtggtcacattgcctcctcagtgtttctgtcaaatctttctttgccactctcttatagggacacttgtgactggatacagggcccacctggatgatccaggttaagctctccatctaaagatctttaacttaatcacatctataaagacctttccttccttataaggtaacatttacaagttccagagaatagaatttaatatatttgagtggcccattattaacctgtggggtttcataggattgaaaattaccaatctacaagatagagtctctttagcatgacatacaggaatccctattttcctttgatctccctttgtagcttcatttatttcctcctcagattctctggtctagtcacattgaacataatgcaatcttttgtcatacatccatgcccttgtatatactgttcactccactgaatatactctttcctctttgtcacacttccaatctttcgggaccttattaatcacctctctgtgagtactaggaagtgatatctctatcctctttactgtgtgctgcttccattttgaaacatatcatatgacattttatgaatctgtttacattcctggttaatctactagaccatatttgtcaaatgcagggataacatcatattaacttccttatgtgttaagaacggggcttgacatataaaatacatgtatcttgaatgaatgacttaagagtttattattgatgtgccattttaagtacccaagcatcaggaacaggcatttattaaattctacttatttaggacttttgctgcttatgggagggtccttgtttctcaattttgagagttttcaatgcccctatgtgacctagatttgtttagaagaataccttaactttttacaaatacagatatgtaactcaaattccttaatgtactattcaatataatttattgaatattatttcctagatattataatttttaaataatattcagttcttctgtcctttaatgaacattttaattttccttcagaaaacaataattcaaattgtattggatgttgaattccaggagttctcccaatttcccccctactcaccccttttaccataaccttatggttgccattgatttgtaaggtaaatttcacctttaggaaagacacacttcagagaaatgcacttctgattattctgagaaaaatcaattgaaaaatcaatgtgacaaaaaagaaaaatcaacatgctttccataaaccagaagttataaattctttctaaatacagtaaacatattcttagtaaattaaccataataaatattgagacaggtctttataacatatatgttgaaattcggtcctagaaaacattggactagttgaacagaactcagttactcttagcattcacagcctcagaatgtcaaaatactaaacaccagaatagagtgttctaattatttattgaaaatgagttttttagtaaattaaaagttagtcagagactttctttttctgatggttcaagattttgcattgcccaagtgttagaattatcatgagcaattctcttgcagttctactgtaggttaaaagttttatggctaaggacttggaaataccacacaaaatgatgtcttatatcatctttttgttgttgatttgcttatttttaaaagataatgtggggcaaaattctgggcagatacagtatagatgtacttacattctacaaaaatagaacaactaagatagcaaaatcaaaggcccgcagacaacatctaaagcaaaatgaggtgacagaatgtatgtgcataaatcatacatggctgctgaattgggagggtgttttgcctaatccaactatgggtagtgcacagtgtctgtgactcattaaggtcttatggtgctagatcaatctgggccagacaaattcttaaaagcatttaaccaaagccccctaacaagacaggatcctattccacactatggagaaactcctgggaagagaatccaaattgaataggactggagcaataagatacagaaaagagagggtctagttaaaaatggggtaggagcagggaaagcacatttcaaagaatgaggatttttttatcatgcctttcaaaagagggagctctagagttctgaatcaaaaaaatttattcttgcccgcacctcccttctcacagtacagaaacacttactcactgaaaccaactgagcagcagaataaaactgtccatacaaaggcattataagacaaaatagaaagggcagaataacttctctacagatgatgaaagtatgccagagagacacatatgggagttccagaagaagaaaatcagagcaatgaaacagaacaaatactaaacttgttttttaaaagaaatatgatcgatattacacattgaaagagtgtatcatgtctctggaaaaaaaaaccaataacagccattgctgagacatactctaacaaaactaggagactttaatagttttacagctaaaagtttcttttttataatactaataaatcgttggggtttccaggcaaaaagaccaagtcatttataatgaaaagaaactcagattattatcaaactttttgacagcaacattttatgcagaagacaatgtagtgtaagccagagactttatatctagcccaaatgatatttaagtaaaaagatgacattctattttatagaatgttctagaaaattctatcttatagaatgttcctgagttcctgcaccgttactgagtaatctctaaaagtacaagctatagacaagcagttacgaatgagatattgacaaaagtactgacaagtgggcaattagttaacaagtggaatgttctttagaaacattctagcgaataaagtaaaatatattttttgcaattcctaatgaattaacagacctcagcaatagttaataacagcttatctcctgatagaataatacaatactataaagtagtctctcacggcccccagtgaatctgatcaagcctctggacataaccatcaatttataggaaatacaagactcagatgaatgttaagtgacatcatggggacgttttcagccaaatgcagaccacagaaaccatacagggcaaaaataatccctggtttcttcaacaaaagattacaaggggaaaaatgagaaaaaaaacctgtagaataaaagagatttaagagacatatcagttaattacttatattgcaattgcatttctattacaaaaccttattttgatcttgatcaaacatacaaacttatatatacatgtgcacatatgaagatcaaagaaatatgaacattggctggctatttgatgatattaattttgtgatggtgtacatggtaaatagaaattattgttaatatttgtgcctgtgataacttttgttatggtttaaaacaagtacctttatcttggagaaatatacactgaaatatttacagatgaaataatatgatgcctgaaatttccatcaaataattttgggtcacattgggattatagataaaacaaggttgactatatgttgacaattgctgaatctagattcaatattctgtaatttctatatttgcacacacttgaagatttatataataagctttaaaataaaagacaatttagtgggaaggacccattttaattaattaaaggattcttgtagcttttttttttcctggctaactaaaatacataaatttgtctagtttaatacaggatgggctgtgcctgggggcttcacctgtaatccaggtgctttgcaaggccgatgcaggaggatcacttgagctcaggagtttgagaccatcctgggcaatatagggagaccctgtctctacaaaataaaacataaaaaaaaaattagttgtgtgtggtggtgcatggctataagacccagttatttggaaggctgaggcagtaaaatcacttacgccaaggagttcaaggttacagtgagctatgatcacaccaatgaactccagcctcggcaacagagcaaggccttgcctacagaaaacaaaaaaggacaaaaaaaatggaagtctagttctataatccatactatttactgataagattgtggaatttacaacaaaagcagttttctgttaaattcctttaaacttctaattttcatatcattctcatcggcaatcctagcttgttaactttgttattatacatgaggtatggttgaaaggcttcagtgtattgtagaaagtgcatgcaactgagaatcaattgatcttggtttcaatcctgcctctgttcccaagaatctttgtgacctgggacaaattgtttaatcattctaagcctgtttcatcatctggataatgaaagagttctgtaaacttctctacaattcagatattaccacctctaaggtgtttttctttcccccagacattttattctgctgaaaaagtactatgggattttcctaacgtcaaataggtagaagtttaaaatgaggtctaaacccctaagtcataggccaagtgacaatagaatagtaatgtatccaggagacataattttaagttagaagatgaggaaaacatggcttaagtttgacgggaaagctctaaatataagaatggatcctaaacttatgaggaagtagcaaaataatgctactgtggaaaaatgaagcttggtaacacaagatgaataaagaactgcagcaaagagaaaccaggaggttacccagacacttgactcagcacttcccaaattctacctcgtttattcttaggtattaagtgaaatacagtgtacttgggaatggcaggcatgaacctgtcaaaaaggtcacaaaataggcaaagctaaggcaactaagatcacttggcccagggaatgctgaagtggagggaaactacaaaaacaattcttcaaattggcaaataaatattctccagatgaagataagcagctgttttagtcagctgggtagtatctgggcttatattacagaagagagaattatagttaggcttaggaaaaacttcctggtacctggcagttggaaatgttccttctctggggatctttaagcacagggccgaatactgccttgagatgattttagtgtagccttcttgaagttgtgaggataaccaaatgttgcatatctagtgatttacattcaaatctcatagatgtgggtaaaactaattggtttggtgcagatacaattctggcagatacaattcgggcagatgtagatcagacctcatttccttctctgattatttcaatttcctactcccctgaactatcataattatcaacatcgtttcttaggtctatcagcaattgttttataaatttgggagctccagtgttaggtgcatatatgtttaggactgtgatattttcctgttggacaaggccttttaccattatataatgtccatctttgtctcttttaactgctgttgctttaaagtttattttgtctgatataagaatagctacccctgcttgcttttggtgtcctttcgcatgaaatgtctttttccaaccctttacttaaatttttttgagtccttatgtgttaggtgagtctcctgaagggtgcagatggttgtttggtgagttcttatccattctgcagttctgtatcttttaagtggagcatttaggccatttacattcaatgttagtattgaaatgtgaggtaccattgcattcatcatgctctttattggctgtgtgctttgggtttatttttattttttgttcttgctttttaacttgtatttttgatttataggtcctgagtgatttatactttaaagaggttctgttttgatgtatttccaggatttgttttaagatttagagctccttttagcagttcttgtagtggtggcttgttaatggcaaattatctcagcatttgcttgtctgaaaaatacctcatctttccttcatatatgatgcttagtttcgctggatacaaaattcttggctgataattgttttgtttgaggaggctgaagatagggccccaatcccttctagcttgtagggtttttgctgagaaatctgctgttaatctgataggttttcctgtaaaggttacttggtgcttctgtctcatagctcttaaaattctttcctttgtcttaactttggataacctaatgacaatgtgcctaggcaaagatatttttgcgattaatttcctggatgttctttgtgcttcttgtatttggatgtctaggtgtctagcaaggctggggaagttttcctcgattaccccccaaatatgttttctaagcttttagaattctcttcttcctcaggaacattgattattcttagatttggttgtttaacataaacccagacttctcagaggctttgttcatattttcttattcttttttctttgtctttcttggattgggataattcgaagaccttgtctttgagttctgaatttctttcttctacttgttcaatgctattgctgagactttccagagcatttcacatttccaaaaatgtgaccaaagtttcctgatgtggtgatcagggaacacttctacactgctggagggaatgtaaactagtacagctgctatggaaaacagtgtggagactccttaaagaactaaaagtagaactatcatttgatccagcaatcccactactgggtatctacccagaggaaaagaagtcattattcaaagaagacacttgcacacgcatgtttatagcagcacaattcacaattgcaaaatcatgaaaccaacccaaatccccatcaatcaacaagtggataaagaaactgtggtatatgatgaaatactacacagccataaaaaggaatgaattaacagcatctgcagtgacctggatgagattggagactattattctaagtgaagtaactcaggaatgtaaaaccaaacatcgcgtgttctcactgatatgtgggagctaagctataaggacgcaaaggcataagaatgatacaatggactttggggacttggggggaagaatgggaggagggtgagggataaaagactacaaatatggtgcagtgtacactgctcagatgataggtgcatcaaaatctcacaaatcaccactaaagaacttactcatgtaaccaaatacctcctgaatcccaataacttatggaaaaaaatagtcaacatcaaaaacttctcaaactccgtgtgcatgtggaatacgccagcccactaccaatgaaaagaacataatatctatccttttgagtatctagtccctatcctcatgaaaaaaatgcaacatttattgtttttgttgctagtttggttaggtttgtgattcatttttctatggctatgctctcttagattcctttatgatgagagggtgagaaaaaggtggttatatatggattgatgtgagaggagaaatttaataaattaaattaataaaaaaattaacaatagtacaaagaaagagaagggagtgagaattaaggtaactaattatcatgagaaaaaaaggcagagaaaatagcagaaatgaagaaaggacaactctaactccttcggtaggtcaagaaatacttactagtaccagaagtaaaagggtaaataaaacagtcacagttctaccccttgtggtacctactgctgccctactacagttgctggcctaacctagggaatcacaattgtcagagctaaaaacaatagctggtccctgctttgaaagttattattagggcactctgatttcattattagtatttgctctgtagcacatggaaatctctttgtgtgcaaaacataaatgacacaggtgacctgacttgcaaattgggttaatatatagcataaaatgcttccatctaaggaaataattatgaatataaactttgactctgctgtcctctctacttttgtgctggatttttaatgtacttgtctttacccccacctcccaccctcattcccagtagtgtgctgatgaaagatgaaagaaaaagcaagttcttaaagagatagggcacatattatatacatgcaattattaaatgtgtttaaactgcatatagttctgcacctcaactaaggatgtctggaaattgtccaaaatatagtttaaaaacataatcatggcggctttatgtagagaagaattgttcaattgaatgtgaaagcttttatttctccatttcctttttattttcttcctttttttgtttcctctataagcattatgcaatgagatgaaacttctccctttccacattttagacactgaataatactgttgctatggtctgaatgttggtgttcctccaaaattcatatgttagaacctaataccaaatatgatagtagtaagaggtgatgcgttttgagaagagccctaatgaataagtttagtgccctaatgaaaagaagtcaaaaggagctgccttgccctcactgccacatgaggacaccccaagagagaaccatcctgcctcagcctcctgaagtactgaggttacaggtgtaagccactgcacccggccaataaattttttttcataaactactcagtctaaggtatcttgttacagaaacccaaatgaactattatcaatttggtgttttatataatgcaatttatttatttggaattttttttggcatactatttttttataaacttctttgtttcaagcataatttttagtaaattatatttctctatgaaaagtttgatttgttttcattgggattatgttttcttaaataatatgttgagaacaaaatcttagtggagacctatttctgaaaatgcaatttaaataaatggtaaaatacgattattagcaaattatatttctctatgaaaagttagatttgttttaattaggaaaatgtttttaaaaatgatgtgttgagaacaaaaccttagtggagacccatttctgaaaatgtaatttaaataactagcaaagtatgattcactttacaaaaaatgttactttataccaaattatgttaaggaaattatttactgtttaaaattttttcacacagatgatgtagatgagaacaggtaaaaatctatacacaatatcctttagtcattagttgaatgtgcaccaaagccaccattttcaatcagagggatcacaaattacttctcagtttcaggtattttatatgaatattttcacagtaatgcaatgagaaagttaatttaattagccctatttaccatttgggatacaaaattgagaaaagaacatgtgcaagaacacacatctaaaagcgttaaacatgcatttctccaccttgtgctataagaacaaagcacatacgctaatattagatgaatcatgattctttcttacttctgcaagagctatcacatatatgaatcattaatttcagtttcaaatgatttaaatagaactcagaaagattctgtgagtcatgagagtctctaacttagtgattttacatcttatctccattttcctacaagaaaacagttctagattgcagtccatatcccccatatttgaaaatgtatgttacttaagattttcaaaggattatataaaatagtggagccaaataactcacttactgtgctcataaaatgccagtcattaatcttctaaacatacatggtggtgagtaagaaacttctgtccattagttgttggaaaaaattaatggcagagctgaaattcatttctgatgactggcaacttttgttttaaaatctttttatttttcattttttaagagaaattgcctttaagtttgtcagcctagtagctctgtgttgcatataataaagaggaagctttatttgttttaatattcattgttaatattaaaggtcaggaaactttttctgtaaagtgtcagacagcaaatactttaggcattgtgggacatacagtgtcccttgcaactactcagctctgacattagatcatgaaagcagccacagacaatgtgtaaatgaatgtgtggctgtgttcagcaaaactttacttacaaaagcaagcaacaggctggatttggcccactcagctgtagttgacaacttttgatctatattaggacaatagtcacaaaacagtagagaatataggaaacgttctatgccaagtttaacaaagaataaaagttcaaagaccttttaaataagtttttaaaaatattcatagttttattattcaaattaattcaatcagagaatttgaaatttcgaccataatttaatatcagagttaatgatttttaccatataattgttttccttattatactttactttattcttattttcattgtaacttcagaaaataaaacttgattttggaccataccagtataaaagccccaaagagttaaatttataaattatcagtatactctcttgacattttgttactaagttcaaacaagaaatgtgctgtaacaactgtggtgaaataataatttcagttccagggaatcacaaaatgaacttgtccccataaatatatgatgagttattgattatcctaactttgttaaaactccaaccttccctggttttcatctcaatggtataatgagttctaaacatttatcaactgagtttggaaccacagagatattagtgtagatctcatctttgtcatcttgtgaacctgagcaaattacttaacccaagtcagtgagtttcttcatccataaaactaggtgcttgtatcttcattcaacacccccgcttacactgttgttattaaagaataaataagaaataaattcactaagaaataaattcagtggtcaatgctaaaatataacagtttgagacttaacaatacaacatcactagctctttcttgtgtattgaggtacttcaagggaatctttataagagagttaaagccatggaaatgcacatggacacacatgatttcaacatcattctcctcttggtgctgttacatggctaggctcagagttccttctcaaaggaggctaaattctcatgattccacaagacaagtctatttcctgtaacggcctttgctatttctcatctcagccaacgagctctacaggagttggtcactgcacagtcaattagccaaccccatggctcacattattgattacatgtgagcatttgattacattgagattatgttttcttaaatgatatgttgagaacaaaaccttagtggagacctatttctgaaaatgcaattttcagaattgcaattgattattgctccatgttctagaacttaaatatgcccctatatatttatttgcttttgaaaaagtagaaactgtttcctcagcggaccacagaaaaaaacacatatgttgtacacatgtttgttattaggcagagtctaattctgtttcatactgccttcattattgattttgcaaatcttcccctttactcttggttcattcactctcacatttggactgacttaagccccatcttctgttttttttttttccacttttccaattctgttttgtatgccaaagcactaacactcacacttatgtaattaggccaacaaacatgtattgaacatactaggtttcaggctctatgaaaagaactgggagcaaacatacagtccctcatggagaacatacctaaatgggaagacagataagcagaactaatggttaaaacataatgtatgcattagataatactgaaccacttcagagtgagatctaactctgtctgttttgggaagaagtaagaaggatataatggtgagctgaatcctgaagaacatacagaagttttccaggcagaaaagagtgttccaagtagaacatgagtcacatgcgatgacatggagctgtgtgagtgcacagagcagtctgggaactaggatcattcaacatggccatagtaaagggcgaaggaagcttttgtggttaatgtgggcagagatgagcctgggtcacatcaggtttaggagtttgagccgtttatctgacaggtcactggattccactgatgaattttaagaaggatggtgatatgatcagatttgcattttggaaagcccctaggtggagagtagaatgaagccatgagagattgaaggcaggggggtcaggtgagaaggccgctgcaataattcagagaggagggcctcaagttatggcagtagtagtgcagatagagaaaaggggaaccaaaatggaactcttacgtggatcctattattttactatgtgccaggtaccaggctttaacttcataaaatccttaaaaacaacagtgtaagcgggggtgttgaatgaagatacaagcacctagttttatggatgaagaaactcactgacttgggttaagtaatttgctcaggttcacaagatgacaaagatgagatctacactaatatctctgtggttccaaactcagttgataaatgtttagaactcattatatcattgagatgaaaaccagggaaggttggagttttaataaagttagaacaatcaataatatcaagtgctgcaacaaaagttgaaaaaaaaatacctgagcaaagttcaaagaattaggcagtcatatatggcgtcataggaaggtagtttccaagtagccaggaggctcgagtcagatggcatagggaagagaaatgaatgagaggtgagatgatgtgtaaaccttaagacacttagcaataataaaaataaagtgatcctaaatattctgtagcttcccaattgctttctatagattgtgtctcaaaatagtgaactactcaaagtaaagggtagttacccctgcctagaataatatctggcaaatagcagatgctccctaaatatttgttgagtgaataaactttcatccttagcactgattcagaaaagaaactagaaatacttaaagcatatgttttggacacagatctgttgatgatgtccagccccaaaggaaaagtatccattcactactgtgtttaaggaatctcttatgctcccttaaaagtgggagagaatgtcagtaacaggaaaatatgaagtcagattaactgtctgaggtcatataatgcatcgaggtggagggttgagacaaaggtttcctggttcccactcaaaagcttccagataccttgctcccatatccttctgctctagtagtaaatgtctttctttctttgatcttttcttatgctctgctcttcactaatcttgatcttatgtcccagctctgttaatagcttttgatggcctgaagcttctttcatttatcacatgtgcaaattggaacttaattcccaacattacctgacatgcatccattcacttattctacaaatattaagtgcctttgtgctaacaacattgcttctggcactgtgaaaatagcaaaggacagcgtgtttccctctctcataaagctaagtctacttttaaggatttctcacctacttggtattatacctactggattttacatcaactggatcttacgtcatccctgctttgtgtttgtggtcttcctccaggcagctgaccaaatgctcgctgttctatttgtagctaggtccaaactattaagcatcactgaggtgaaatgatgggggttgtattttccacttaattttaaaggcctcttccttcctctttcagataactcttttcagatatcttcagtggttctttggttgacagataggatttgttttcattgtctccaatccttctgctcagaaatgtttcaatttatgagtggatctgccctattttattctctattacttttgagggcagtgaagaagttttcctatgtcaatacttcctactcatcatttgagtataataggtaaactactgagaacctggaccttattttgttcctctaattttatcttttgtaccaaaaataaacagccttcacaatcacatctgtaccaaaattaaatacatgggaaacactttctatctgaaggtattaatataaatatcatgtcattttcttatttaggttgtttctagtatacatactttccattttaaagacattttaggaagtttttgtttgtttattttttgacacctcttcaccatgaagcaaatattctgaatctatgtggtcttctgttaacttgtctttagagattgtatcattaccattgcaagagtataataaaaacaggctttctgtgagcatacgaaaaaaagtggtaaaaaaaaaaagtcctagagttgacaaaacatgagagattaggaaatttgaatggcttcattttaggaatgaggaaaccaggttggaaggatgaggctgttatttaaagactggtgttagggtatagtttccatttcttttctttacaactgctcacatgatgggatcttattgcagtatttctatgtgtgtgtatatataactcttatcagattcttgaagaagattaaaaactaccatttgagactattgattttagagttcagcttggactatgatgccctcttatgtgaaatctgaaaatacatttatggattttgctcactgtgtgcatggaaaaattgcaaaagcagaaaggcccttttgaagttaacaatcaaatgtggccactggcaaccttttggagctttttgactcttatttgaataatatataagatgggagttggaagtattgttagtattgagaaaattttcttgctccagaaatggtccgttctatcaacctgcccattagggattcatttagttaaccaaaattgttttttaaattgattataatttgttcaccagattgattctgtgcctctcacatctactgcaatgaataaatagaagtttggtcttggccagggaggaattcttttgagaggagcattcaggaagtcagcctgtgggtatctagagctctgagaaagatgggtagagagaagactgaaaaggtgccccaaaactctgggttttgatgctgccttcaaccaaaatactgcttatattgaaagaaagcgcacagatactgtatgtgtgagctcttagcagacaatgctcctggcatgtaggatggtcttgctttgaacaaagatactccagggtgttggaaaggtaaaagattcactgaggatcagggtaaacattcctgagcatatgggcaaatgaacctgagaaagggttttgtggaatgctaaaatatttatttctccttgcctataaacaatgtcagctcctaacctctccccaaataaacaattgatgttgggaataactggagctcattaagaaggttaggaaaggtatatggcatttgaaagaactggcattcaagagtgcattgaggttgtgtttacttcaaaagacagattattaattttgactgaattggctagactgatgatttcttatccaaaacaaaatctcaaccatcctatttattagactggtgcttttttaaatgacttttttcccccctcaacaaactggtcaatatagtgaatatagtgacactggtttgtgtatctatagaaaaactaaaaaaataaaagttaacttcattatcatttattggttatgtgattgagcaaattacttgatctctttaggcctaagttttgccatttgtaaaatggtgctaataatagtcccgtctcattgggttgctgttaggatgaaatgagatatgcatgtatgcttcttagaatagtatttggcacacagtaagtactcagtcagtgttagccatcacactgtaaagcctgtctgttcttgctcccagactagagtgctcacacagcactctagtgccatgcacagatgggttaacctgaaagttaagatcaggtggtggaggagaagatattaaggttttctagcagtcttgttttctcctccctgtgactgatctgacttctgaactcttctgtgggtctgatctgtgggctcctccttccttgccctccttccactttcagtgttctgatggcagttagcatgacaaagcctatttctgaccttcatgacccctacttccattcttgtttctgtcctaatgagtagggcacattaaaaaactcctactctcctttgcttggagaatactatacaatgaattctaggtaggtgaagttttcaaaattattcagttgctacctgataacctgaccttattttttctctttgttctatgaaaaaaatatatctgaattatatatatatatataatttttattttattttatttttatttatttattttagatggagtttcgctcttgttgcccaggctggagtgcaatggcgtgatcttggctcaccgcaacctctgcctcctgggttcaagcgattctcctgccttagcctcctgagtagctgggattacaggcatgtgccaacacgcccggctaatttcgtatttttagtagagatgggttttctccatgttggtcaggctagtctcaaattccagacctcaggtgatcctcccaccttggcctcccaaagtgctgggattacaggagtgagccactgcgcccagccctgaattatattaattggcaaagtctattagatttcttttgaggactttcattattttatttttatatgtgtttctttcttcaaatgttttacaataagcatatgccatttttgtacttgaaaaaccccacatatgcaaatataatcatattactcctctgcttaaaattcaatttgtcctatgtgtcctagctcccatcctattgaaaactggattaaaaaggatgtggcaattttacaaatatcctattgtctttttatggcaatgcagttgctgaatgactgactgaattcttggaaacccaggaaacagaatattggggccccaagatgatctcttcccacttaacatctggagcttaattaagggcaaagatcaaatcttaaaaaagtttatgtttattgtttataaaccagattcttgtcctatgtctctctatgagaatttccgcaaggaaagtttctgaattctttcacagatttccctgtgggaattctcagagagttatataggatgagaatctggccttcctagactttatgatatgtttggaaaggggagtgggagcccagctaagttatttttattttctgcagtattcttctgggagaagttgtaatttttgaatcaagattttatatgttttgaaatttccaaagccttttgaacagcagggtctaaacactattgtattgtttagtagcctcaaacttggatttgtacttgtggtttgagaagatatttcacaaattttttaaatttggtgtttccttttatatgcttcctacagttagaaaaccttggtataaaatgccatatttatgttggaatttggatttaaaagcctttgattaataaagtggttctttttaaaacagcaagagtccacatttatggagaatttttatcagtaaaactttacataaaacagctgtaaacagtctactacgttaatttgacaggcaaattaaaaaatggtataacagtgtgaaagataatacagcatgtttcccaaaaaggtcaaagtgccaacagagctgaataaaatggtactcttgttccttgaggccactcaaaggccagctcctgaaatatgagccatagccctttaaatatctgtgttattatgacaatgccaaggactttagccataacttccacatctagcctagaggatgggaacaaagaaagtgcattaaaaatgttcttcaagcttaggacatcagcaagttattttctttggaatctttaccgttttggctttttgttgttcatgtgtcacaactttatgcactatagaagccttctctttaagatgcagatacgaatactgttttaagtgatcatgttgacattcctgcctcactctatgttgtataattactcactttcccttttggagttagtgatctgaaactgatttctattgacttttaaaatacataaaaatattcacataaaatgaagccaagttttagtaagaatgtccagaatggaaagttcaggatggaaaaagtgagcttttgtctttttttttttttttttaaattcctaggtggagatgtaggaagaaacagccacatttttgcctcatcgaagctaaagattcaacagaatttttttactgcatgcctatatgtgctaaatgctttcccatgttatcttgtttgtttcttgcaataaattagttatcctggtaagtaaggataactaacttggagttaaagttcaggaaataaaagctcagaggtaaaatgacttttcctcagtcactcagatgtatgtggcccatttgaaacttggatctaaccttgactcctaacactgggctctgctcactataatacaacataaaacttgaagacagtatattagttagtttagaaaagatgcattgttaatccatcacattgtgctatacctgtgaatacttctttcattatgatgttattgaaaatagcagtgtttcctcaactttagccatccaaaatggctgtttgtttcatcaaagccttacaaaatctgatgttaaaaatatcctgaagaaatagctaaaaaggctctcatttgagataagaatcaaacatacaatttctttcttctgtctctattagcagagttctcatggaattgcacaagtggttcaagcagtcaggataagttggttacacctctccatctactaaaacttaaccacatctcggggtatgtgtgtatacaatggagtatatactacaaatggtgtttaagttcctgggataaagaagtctttacaaatggtatggagaacctaggagttttctattacagcagataacctgttggttccagggaaagagagtcctttctgtaaaggactgtatatactacagatacccctaaaaagcaattttcttaatgactttgctctgagagcctggcctactttctcctgttctctcttgctgagccctgaaaggtgagccccaatttgcgcagagttgcttaaccactccactggccaaccttagggttagggaggcctagattccttaggattccctttaaatctgacctcagattgtttgctaaagcctattgcagggttcatatggtgcaaagtggggcattagcagccccctcccacccacagacatactatctaagtgcaaatggtgtccttgctgtgcaaatggtatttaaaggaagtctcctagctcttccttccaagaaagctgatgcttctgaaacctctaaacccagaactaactctagccaaaaggaatctagaaacataatgcaagaattctgtcttagagatcattcatatggccactgccagaagactagtctatcaggggccactctcccaggatctgagtactcctctgtccatcaggaactctgacttcaccatggagaacaagaggtgaggagagtcgaggaaaacaagactgattcaatgttttcttttttttccaagtcacgatctttatttttcaggtttaattcctgtttctttttattcttttgcatttttaaagatgtaacaatcagaaggaaaaaactattaaactattcagttgccttttgaaaaaaaatttgatttcttcatttacaaattttgaagagtgctttcttcctcatgattcctttctgctgcataaagacacttaataaaaaaggcactggctgggggcggtggctcacgcctgtaataccggcactttgagaggccgaggcgggcggatcacctgaggtcaggagtttgagaccagcttggccagcatggtgaaaccctgtctctactaaaaaaaagtacaaaaaattagccatgcatggtggtacatggctgtaatcccagctactctggaggctgaggcaggtgaatcgcttgaacctgggaggtggaggttgtgatgagctgaggtcatgcccttgcactccagcctgggcaacaagtgtgaaactccatctcaaaataaataaataaataaataaataaataaataaataaataaataaatgaatgaataaataaataaataaaataataagagcattggatttagagtcagaaggtccaatcttggctctacctagatatgtagttcatgtctattaagatcctggaggagggctagtatataataggcgtgcaatttatagagccaatatttttattattatacataatatcatgtaaagactagatctttctttttggtcaccagagtgccatataaactgttaagacgtacagtccattaaatataaagctggctgatgctaactgatttttcaatacagctatcttagttttctaggtctattgtacaaattatcacaaatttgatggcctaaaacaatataaatttattcttacacagttttggaagccagaagtccaaactcaaggtgttgtagggtcatactccttacagaggctctagtggcaaatctgttccatagctcttctagtttcagatggttgctggcttctttacttgcagctatgtcactcaagtctctgcctcttttatcacattgccttcttctctgcgtatctcttaggaggacatttattgtatatagagcccacctggataatccagaatgaccctcatctcaggagccataacttaattacatctgctaagacaatttttccaaataagataacatttacagattccaaaggtcataatgtgaacatacgtggggaggaagcatccttcaatttactacaatagcagtttgagtttaggcgctaatgctatgtttgaattataagggtgtgtctggctttggttatgttttagaaagttacttgtgcctgagcacatcacctgaatgcctggctactcttaatcagatcaagtctatacctataaccctaaaatagagagggcccaaagggccccttcttgggaagtctcaggcaagcccttgcatgtggtccaaaatgtttctgaggcatatgctgagaccactgaggaacgtcccacccctgtttcatgggataagaaaagtatcagttccttgggagatgagaggctgcaggaacaagcctatcactctctgccagcaaagtaacagcttggagaggtaaccaaacccttaactccccctttctgccaagggtcctcccttttcttcattacttggtttcaggtgaacaggaagcgttattaatattgttgatgatattttacccatagcctatgattctgtgtgccctgtcctttctgtgtaaagccctactcatagaataaaaagaagcttctctttattcacctctgaaagaaaaatatgtagcgtttaatcagactagcaaacgctaacaattaaggatccaacatattgctgtttacccaagctttaaaagctaatcatctgtgacacggccttgtccctcatgcagtcactctgtaggcagttctaatatcttcaaaaagcttctcatatgtgttcatttcactgccatctccctggtgtgtgctgtctacaagtctggacttgtgaagtggtcttctaattagatcacctgcctctaatcactctcctttctaatccatattgtatcttattattgaattaatcttccaaaaatactcctcctttgccccattacatgtatgatcagtgaaaaacctccgatggctgtcttattggctacagaaggaaataccaattttatatcatggcatttaaggttccatataacctagatataacctgttgctccagccagtctgatccactgtcccaattacgtttcctctgacctttgctgctggtcattcttccacctagaacattctttatctttgactcctcctcctcctctcttaagaagctccccgcaaaagccccacacatcgctttcctctttactgctcattatacaagatcacaccatattgtgattcatctttgatgtacatgtcttgtcttatctgtacttggtttctcaagggcaaggttgtgttggttttttaagaatagctttctacactcaacacttctactgtcctagctaactcttgagaaggataaagcttctggagggagaagctctatctttatttcattaacttctgctctgtttaaaacagttacttaaacattaaatgatagctccaaatactaaaggtagccgtcctatcggaagaatgaaaatgcactattcccttatatcttaccttgttttctgctaacactgccttattcagtgcacttatgctttaaaaaccattttatatggaaggatgggggatacgaattcgaagcctgaaagaaaaaaggagcttcccaagttatatataacactttatatttcaaaaccaatctataccttatagcaaatcactaaaaatatttcagtatttccttgaaggaattagaaatggaattttgtgatggcctggatttatttcctttaatgaaacagggtatgctgcttccttatactttctttcgggtaactggaaattttgaggtttaacaaattgagtttcattagggtcttctgtttactaattgtggctaaacctcagaacctttggttcaaaagtgttgctatttcgtgatttggccctcctcaagtgacaagtttgatagaaatcccataaaagataagattaagaaaaagaacaatggaagaaattattttctttctgtgttgttgccattatatagttattgccatttttccaattagatggcccttttttttttttgacacaaggtctcattctgtcatccatggtggaatgcagaggcatgaggcatgattgttgtttattgcagcctcaaacttctggactcaagcaatcctcccgcctcagcctcctgagtagctaggactaccaccacgtccatctggtttttaatttttttaaagaacggtcttctatgttgcccaggttgtctcaaactcttggcctcaagtgatccacccacctcaccctctcaaagtgttgggattataggtgtgagccacggtgcctggcctagtaggcttttataaagaaaacacttttcgaaatgcaacaaacaatagttataaatccaaaaatcactgaatactagttctgttttaaggtaaggcattctattctcttcatgcttccaaaccatcctacatgaaatctaatttctattttccctagtggtactgttaatgaccctgacttgtaaagaatggcatgattaggcttgctttgcgtttgcatatatgctacacgtatgctgacatacaacctgtcagcattttccatatctcttatatcattagaacaggttctgttcatttggacccagaagttttattaatagacactgttgtatagccagtgcttttaacacttctttagaaactaatttcatggaagtggacaaagattaactttgttaagattaattactcagtattcaccacatctgaaggaatattgaccaagagatttgctttactgaacaaggagtgtggtgctgagtttatgggtttaagaatctcctgaaattagcacaatttatacttgcaatagatttgtcagatgcaatctcagatttcaaactgaggcttttatgtaaatgcttacaaagcctacttattggatttataaaaagctgactatattggcaatcttgctatttatctgttaaaccttgtttgttggttgatctgctttcaataaataggactatgcattggtactccaaattctcctcaattccttgtgtcctcacactgtgttaattcttattgcagtgctatctacagcaggtatggacccttcccctggaaatactctcagcaatccactacagaatgttgtggggtcaagagcacagcttggtgcagtgttgaagagctcttgagccaggcatctgggctttgaatctggcttggtcactcactgtgtgacctagggacaagtgtccctctcatgtcttgtttttcttatctctcatgtaaagtcttgtctcaccacctcatttccaccccctgccctcccttaccctgttatatttcccttcatggctttgattaccacatggcatgatgtgtgtttgtctactttgttaactctctgaatccctccatcggaactgaaggtccatgaatgctgaagctttgcttgttccaccaacatgcataatagtgcctggcacataccaggtgcatctatataagttgacagagggatgaataaatgagtgaatggaaaatggagatagcggctgaatgtgcaaaatatcagttctttttgacactctggaagactggatgaagcaaggaaaaactggaagttcaacactggataaaggaaataatccaggaatggtaagaaaaggtgtttgataactagaggagaggaataggtggcttgaatgtagtttcataaaaatgcatggactatgcatctgtcagatgcagaccacaagaaaagcagcatgcaaactgagctgaagtagaggttacctaaaagagatggctctatgcccagctgatgacttgaggcagcccacaccaatcataaagtgttctatcacatctaaaaacaaatgggacttgattctcctttatggatatacaatcaaaggcaaatgtcaatagggtaacgagtaaaagaagctgctaatctagcctccatataatgctgacacattactcagatgatagtaaatacacgatgactagatataaaaatttttaacgcgtgaatgcagagtaaggaaaatgcataggacccgagctgttgagcactggggcagaggaagtgttcagtataaaagacaaccttggtccttggcacaagatctttgtgctgctctgagatttggagcaacgtttggtcatgcttttttcttcatctacatttttaaaagactcattcactagaatataaaatatgtaacaagaacttacatgaccttccagcatcctgctcgtttttcacactgctttggatttggtagctccatgtattaagataatcaggatgctcaaatatattgccacacaccgtaaaactgggtgatatccatgccacagccattggcagcatgttactgaaagttttgaaggggaggaagggaactgtgcatataatatttcacccccatctattctttccccacgcttcatcagaacagatggcagagatgcattagttgtctcgttttgttttgaaatgtttcattgtaaaataaacaattcttcagtagagtttttgttagtacataaaactagacttagagtaaagttaaatgccttttccccactacccctgccccaaagcataaataaaacaaaaattaaaagatgcatcaaaccaaatacaaataaagcaaaaagtcaaaaggagctaataaagttgaaactgctggcaacttctgtctttgtcctaatgtgtttctgtacaatgaatcttcctatttacccacaaattaatgttttcattatgctgcatttagttttatattgcctggcagtatgtctaaggtggctttgagtaagccacctcattaacaatgatttattgggtattccacctagtatgaggtacagaagtataagacatgatcattgctctcaaggaatttaaaatctgtttaagtatttttcttaaaaatgatagctaaaaatacaaaactgtatgtgttaagtgacagctaattggtttagacatcagctgctatagaaggttagaaaaaggtgaaatgacttacacttagggtagagaaaaaaacgttgatgtgaggtgtgagctaaagattcagataagtagaaaaagacattccaaaaagaatggtaagagtagggcacagatacaggaaaacacaaagtgtgtttggagtagggggtcaatgaactgtggcaggaatgataaaattagggagggagaaagacctagaatagaatgcacaagtgtccctgaaaattttaaagttccagaattatcccaaaactaacttggaagtttactctgttgctggacagagggctagaatagtatactttcaatatgacttcattcattcatttagtttgttatatggcagtttagcggtatgtgtattaggtgctgtagacacaatgaaattagaatatggctctttgtactcaagaagatcacagtctaatgtggaacacagagaagtacacaagaattaaaacccatactgaaggtcataccatgtcaaacttggggcacatttggcagttcaccaaaatcctgttccaatgaagtaggctcatgtgaatagtgggaaacacagaatagaggccaaggagggagtcatcatcatttatgtcttcaatattgtaacataggacatttgtactgacaacttatgagggctgtaagttatatatagaaaacattccccccaattccccctttttttactgttgggaaaaagaaaaggaggagatacagggaaaaaaaattcacaagaggaagtcaggcccccttaataagcaaatgtttttagaagagaaaaaagatgaagaaattttgttatttctaattgctagcatttaatcatagctatcactcacagatcacatactacttgcctggcactgttctagatgctttgcatgtattaactcagttaccacaacaaccccatgagacaggtactattattatccccttccatacataccttcttagagatggccaaggcaccaaagacagtaaggaggaggagccagggttcaagttcagccctgttcttaaccagcacataacacagctttctcataagtgtgaagatcctagggggtaacagtagtacatggggaggggaagccctcagaaagatgtcagataaagatcagttaaacctaagaaaagctaaaatgggtggagtaaattgatgggaagagcctacattattttactttgtaatggtggttagaattacataaacaggaaatggtttccttttagtaactaataaaaacagtatctaatattgattaagcatctatatgtgtctggtactccccacaggtaccattattaccaccattttgcaaaaagaaaattggagattcgtggttaaatagaaagaggtttgtttaatctttatcacaattcacacagttagcaaggactagtgcgtctaatctttactaccacactatactcattatccctacaattaccttatggttatcagccttgtggattctactgatctgttagaatgccaaaagtcctactgtgctggagtggaatcagggtatggcattgaggggtaagtctatatttctttgacagggtggctggctctttatggcatttcagaacaagaagaattatttgagattttggataatccatgtctctgcctccatccaagggtggacaattgttgatctctttccaatatctaatatttgcatattaactgctctttctcttaaagtaagatatttcacctacctgacacatttcaacttgtaaactccagatgcaggcatgaaaatcatatctcttttcaagttcaaagaacagaaaaccataatcaactatagtacaggaattggagattgcattattcctgttgaattctggtggccaaataaaaatctacttactatttgatacaaataaaggaaaatgtatcaacaactccatagaacagagagaaatcagtcatattcttaaagtcattaaagggaaaagatacaaatgatgttgattggatatcttccatatgctgtgcatttgacatactttatagtaactcatgttgttctcagaatgatccatggcttatgatctcacttcatataggaagcaactgaactacagcatggttaagtaagttcctcccagtcaaaaagctgagtagcagagacagcttagatatgcttacgttttctttgtactatgttgcctttactaggagacagtagagtggaaatcaactctctgtttctgtcagaattgttatgaagactggacataccttgaacaataaaaaaaaagactagaggtttaaaggcagaaataatgcaaagcaaaagggcaaagactgttgttaacattggacaaaagatctgtatgttagcatttaaaagaattttatttctgatcataatttcccgaatctctcgctccatttccatttctcatgaagatgtgcaagtgtaacactgaatttattttccaaggaaaagagctaggactattactaataagaaaacacacttttgcatttctgtagttttataaagtgtcccccacctccttccaaatgttaaatgcttgactataatgtgaaaggttcacttttattcatttacctttctcaaatttgtcttttgcaagaaatgtgctggtctaaatttgattctgttaacgacactctacttaggctttaaatggcttaactgtgtctaagagcacaaccgaagactaatctgactgagactgataagactgtccatgtggttttgacccttggagaggatagtgggaggatattatcctttctactttgtgctgttctcagaggacagtcacaaatgtgtaaacaaatgtgaaagagaaataaaggggacagccagattgccagagatccattactttacccctggggtatgtggctattatagaactggggcaaatgccaagagcactgaattcaaagggacactccctgaagtgattcatctatttagacaacatcagaggaatatcagatcagatcctactgtgtgaagaggttacaccatgggcatttggtagtcactttgggaattatattaatttacagcagcctgagtacacagtgccaatgtgtcattaaaggtgaaggcagaatctatttctattcaagatggaaagggcagttggttgtgcattttttcctttcagccacacttgcaaacatggatggtagccatggtgagtttgaaagataaaggcttactaagtaatattctggtgtcttaaaagagttaatgctttcattaatctcatctagtaagaactgacttaaagaagctttaaaaaaaatcagggaccaattcaccattctgtaaagagaggcaaagtgaaacaggagaaaaacaaccaggctctgaagtcaggaaacctgggttggagccagggccgccactttctagcagtggaatcttggacaagtaattaaacctatctgagacttagtttactcatatgtaagatggacatactaacaacatcctctttacaaagctgctgtgtaatcaagatgatatatagaaaatccatctataacttgaactctgctatacaaagtttagtcattactgctatattggaaaataaaaacatacaaacaaaaagaattcctttgaatgtaattcaaattttagtttcctgaacaggaatgttgaataaatttggagttcacgttcatcatctgtcttccagggttcaaaaagacaaaggtggctggagtcatttcctgaccccaaatccaatgatcaatttgttcttttatggatcatatttttggtgttatacctaagaaatcttcacctaatcccaagccataaagatttattttctatgttttcttttagaagttttgtaattttaggttttatatttaggcctgtgattcactttgagttaatttttatacattgtgagataaagatcacagttcagcttttcattttttattctataatttttttcatgcatatagccttccaattactccagcacaatatgttgaaaagactgtcatttctccactgaactgctctcacatctttgtcaaaaatcaattgtctatatacaagtgaaatgatttctattcggttccgctgatcctgtctatctgtatgccaataccatatagctttatgatattcttgaaatcaggctatgttagctctccaactgtgttctgttttcaaattgttttccctattctaggtcctttgcatttacacatgaattttagaatcagttttcaatttccacaaaaaacctgtagggaatttgattgggactgcattaaatgtataaatcaatatggggagaatattgattcttccaagccatgaaaaaggtattttcttttatttgtccatttacttaggtcttctgtatgtctttcagtaatgttttatagttttccatgtatatatctcatatatcttttgtcagatatattcctatgtttcatttttaaatgctattataaatgtattcttttaaacatttttatttctaattgtcattactaatataaacaaatacagttaaattttgcatatttctctagtagatagcagccttgctcaactcacttattctactagctgcttttgtggatttcactgaattttctatatagacacttgtgtcatctgtaaatagagacagctttacatcttcctttccaatctggatactttatatttctttttctccctattgtactgtctaacccccctagttaaatgttgaacaaaagtagtaacagcagccatccttatcttgtactcaacagtagtaggaaagaaagcatttggtttttttactacgaagtatggtgttggtttttcacagatggccattgattgagaaagttcccttctattcctggtttgctattcctggtttgctaacagtttttatcagaaatagatattggattttgttaaatgcttttcctgcatctactgggatgatcatagatttttctagttttttaatatggtgagttaaattaaattttgaatgttagacaaaccttccatttatgggataaaccccattttgtcgtggtcttttgtatatgttgttgaattaaatttgctacaatgtttttcagaattttttttctctttttatagagatattgacctgtagttctgttttcttgcaatgtctttgtttttgatatttgagtaatgctggcttcatgaattaggttggaaagtattgcctctagtacttcaattttctggaagaattgtgtaggattggtattatgtcttaaatatttggtagaatttttccaattaaactatatgtcctggaattttctttgttagaaggttttaactacaaattcaatttctttagtaggtctagggctgttcaggttatctatttatttttgagtgtgctttggtaatttgtgtttttcaagaaatgtgtccatttcatctaaatgtcacatttataggcataagctgttcacaatatttctttattgtgtagatataccagtatctctacagacttggtaattacgtcatctctctcattactgatattagcaatttgtgtctcttattttcatgatcagtctggctagagaattactaattttacttaatcttgtcaaagaagcaaattttggtttcacttgtttttctattgtttttctgtttcctatttcattaatttccactttaagctatatcatttcatttcttcctctaattttgggctttctttgctctttaatttctatcttcctgaggtagaaaatgaggttactgatttgagacctttcttctttaccaagataagcatttagcacataaatttcctccaacatattggtttagcagtatcccagaaattctgatacgttgtattttcgcattaattcagttcaaaatacttcctaatttcccctgttgactttccccttgagctatttggaagtatgttatgtagtttttcaaatatttgaggatttctcagaaatgtgtcattgattttaaatttaattctactgtatttagagaacatactttgtattacttgaatcttttaaagtttactgacaatgtctttatggcccaggatattgtctataatggtaaatttttcatgtacatttgaaaggaatgtgtattctgtcgttgttgagtgaaatgttctataaatcaattgggtcaagttgattgatagtgttatatcattgatgattttatatcttcttgttctataaattattgacaaaggggctttgataactctagcaattattgtggattttgtctacttcttcttatggctttatcattttttttcctcattatcatgtattttgcaatttggtaattaggtatacatgtatttaggactgttttgttcttttgaattagcccacttatcattatgaaattatctcctttaacccttttaatattctttgttctaaaacctactttgtctaatgtttatatagccacttcagctttcttttgattagtgttagcatggcatatattattcatcctttttacttttaatctagccgtatctttatatttaaagtgtgtttgtttttggcagcatatagttatgtcctgattttaaaaatctaatctaacaatccttgtttttttattggagcatttagaccacttacatttattgtcattgttggtataattaggtttaggtctatcactatcactatttgttttctattttcaccatatattccttgttccatcttttctcttttttttctgtcttcttctggattaaccaagtattttttatgactcctattttatctcctttgttgatttatgagctatagctcttggttttgttattttagtgaatgtaaagcattttttaaagtgaaagttttccaacaaaatgccaaggaagatacaaatctgactctctgtaagactctatggttatgtattttgtcttcaatttttggaggggcattctatgaatgggctgaaacctcaagatgaaatgaatgctggcaattaacaatctcttaaatggggccaagattccagaatacatcttattgtttataagcaaattcaatcatagctactgcagagctgaagtgagatttttttcaactagctgaaaattcctatttttaaatgatgtatagctcttagtgatgccatgctgaatttcttaataagtattaaacattagacattgtgtttactcaggcaaaagattaatagctggcacttaaaataactgactaaaaagtcatgttaacctaaaggtcacaggaagaaaattatttttggtaaaataaagagaaactccagattgttttacatatttctgtgattttttgctggatatacaggtctgatgacttgaggtagaaggacagaacagagaaattccaagagttctgtgatgtcagtgaatgctaagacccaaatatctgtaaggtggaaggtccctttctgaaagatgaaaaattccagtagtccagagttgttcttctgagcattgctagggaagcaaggcagtgtggtataaccatgagggttcagagagagatggctagagtatgagttttggtttcatcatttgatcacttgcaagcagtgctacccagagaacgtcacttaacctttcagaatatattcccttatcttcctatcgaattatcataatttagatatcatctaaataccataatatttattttacaatattttgattggagttaaaagaggcaattttactaaaaattatctataattaggcagtttcaaatgtaaatgattgttcctattaatttacttcctttgcttttcattagtacaacaacagaagttaggtagtaggaatgtaatgaatgcaatgtaatattagcaatcataactaatgaagggagtaagtgagtacttagatcaaacctgttttttcagcagaggcaatggcatttacttcagccacacccgtcatcactgatatttaatgctttctgcctttatactcttccactgagagtaaaaggacctaggttacagtgctgaaatcaaaataatgtaatgcaatatgcttataattatttcatcccaggcttgctattttatctctggttgatagtgacagtcttttggaagcaagcagtgcaatgttgttgcttaagagaagcttggtgttatttgaagtgtctagaggcagcctggtctaccagactccccagttgaatagattctttagtaagtttctgacttgttgaggttttctctttgatacagctggctctttctcttttatttccaagcatgttgcacaactaccttaaaacaaagatgtataacttttggagcatcgaggccatattggaaatcttttgcaaacctaagggctaattctttgatgtatgcttgcatgaaacatcaatgcactagtcgatgtagtcatatcgaaaacaagccaggttttgccacttgcaatctcccaacagtgtaagggtgtgtgtgggtgtattaacaagataattttgaaaaaagaataacaacaggaccaaggcctaatataaacatacataaactggttgagaattaggaaatttgagctctactttgggttctacactgtgaggttttgcagtgtggaggcaaagctttttttggtacccagagttcttattatgtggtgttaattatttgatgcatgtgtaaaaatatttgctacatgacactattaaatgtgagtttctgagctagttgcttaacattgctgaatctgtttccttatcaataaactgggataacagtcatggtattataccttacaggtaatactgtgtggataaaacgagccattgtatgtgattatacataaacttaaaagcctgtattaaaaatcagaatacatattatttgtgcacacaggctctagcatcagaggatttggttagaatagctagagtttgagattcttgggtacattctttaagctaactaaagttatttaatctgtgaaataggaataaagattgcattaaaatagttgattaaatcaaggaatctctgcctcttcccatacaaaattccttgagtgatagaaaaggtattaaaaaatattaaaccacatagcagtagaaaataggaatttgtgccaataaagggctagagattttgaatcattagtgaaagtcagaaatcagatgaagactaagactggaggaaactgtgcccccaaatacaagcagaagagcactttgtaaaggacagagcagttaaaaatgtgctgtgtacttagtgtaaaccaatataagtagcagaagcatctctgtgtgactagtcagtgaactaaattctgatcagctgtcttgttactttccttctctgcctcttccatttgctgaaatacagagaaagggccctggtacttggcagacaggcaccactcagtataactggagacctttaggaaatgcaaggcacctccaaacctagagggaaagtttccagcacactgcaatgagcatacttatttccttttccttttattttagagcaccaataattagaatctacatcttctccataccacccccaccaagaagatttccaaaagctaagagacagaaatcaaattaccaaatatttgggggtaaaccaaaaacattaaaaaaataaaaaaagaccaaaaaaattaaaattataagtaaacagtagaactagtagaatacttcagtactttaaataaaaacaacatcctaagaatcttgagggtagcagaggtataaaataagaaaagccttaagaaaatgaaacattaatgcatctggaattagaagtttccagacaacacaaaaactatctcaatagatagctggatagcaaaagggacacagctgcagggcaaaaggaaaataatattcaggcacaaagtggagataatgatagtgacccctcatagttctgctgagaggattaaagaagagaaaccatgtatgatcacctagtccagtggctaccatgtggaaaccttataataaaagcaattttattattattgttgttatccatgttgttgttacagtcatactccatactccattcctggttactaatgttataacaattataataattattatattatcagtaaaatgaaagggtatcaatgagtgatctctctgcaaaatcccagatttaacactaagaattgatgacattaggagggagattgaggtgggaaggagccagggaagtgggatgagaggatcctggggcagaatgatgacactcatgagagtgttggtaagggactgtaggaagccagatgtgaggacaagaaagaaagggacatgggaaagtaaagagtaatcccttgccttatattcagagagggtcagccactgggttggtgttgtgggctcattctgagttctgataaggtaacttacctttactaagtaaaagtgtgatgagacccaggggctggatggaggccctgcatgtgtaggatgccacacagagggtcagcaagagactcatccggcagcctcttattccctatcctacaaagatccatattgctactttcaatcaggtataacctcgggccagggcagttctgaatcaaaaccaaattctagccccctgttccacagcaaatccacagatttatgccagttgtatattttatacctgtcaagattgacaaagccactcacaatgatatttcttaatcaatccaagcttttaccatttaatatgtatattgggagcaatgaaattttcagtttactagtgagaaatgttgccaggatacagaccattatatgcatccacaaagtcccaaatacagacaaacctctaagtgccttttaacagatttgtttctataaaactattctttgggcgtcaagttggtctttgtccctcagaattctatcatttacccctataattagataaaagtctttttttttttaaagggaatgcaggaaagcttgggacccatttttatattttcataaagaagtcagccaactaaacattatactttattaccattaagtgcccaataataaaatcagtttgcagatacaatctacatttccatatattattgatacaagcttgcgctttgtaatttcaagaccaaaaaaatgttggtagaaatttgcatattattgaaatggcatgatttattgatgaaacacacaaataatagaggtgatgcttacagcagtttgggggctaatgtataatttacaatactaaacaacttcatgaacaagagtgaaaattgcacattatgccctgcctgaaaaatactagctataaaactaagacattttagcattattttttgtaacaaggatctcttgatgggaaagtgatagactgttggccttcaatctgtgagtggtataaagaagtatcaatctgcttgaagagagaaggcgggaagtcatcttcctgcctgcctgcctctccagtccaacctttcattaacatttgcttgcagaaaagatatcaataaaagattgcatttaatgccccaaatagatggggcagaattttaaatcaacaatattgctcaaaaccagacaaatttatggtacaatttattttagaaccaagatatttatcttataataagaattattacaatcattgtatccaagctttatgtcttagggggaaatccaattcaaggtttacccagtggaccagttttctacaaagcatttccagattccaggataatggactgtgctagacacagttggaagccttcccaattcttatttccacaccctgttttcaaataaaacattgattccattcattaaccctatgtaactcatgagtcatgcaaggttgactttatcctcattttcagggaatagagggaggatgttatttagtctaagccaatcatggtactctcatccctagttcttatgaatgcccccaaggtccaatcctacccaatgagatgtgagggaaaatctgctgggtgcttctgggaaaggtttctccactcctaagaaagaagctcaggaggccgggcgtggtggctcatgcctgtaatctcagcactttgggaggccgaggtgggcagatcacctgaggttgggagttcgagaccagcctgaccagcatggagaaaccccgtctctactaaaaatacaaaattagctgggcgtggtagcacatgcctgtaatcccagctacttgggaggctgagacaggagaatcacttgaacccaggaggcggaggttgcggtgagctgagattgcaccactgcactccagcctgggcaacaagagtgaaactcctaaaaaaaaaaaaaaaaaaagaagctcaggaaaagatggacccattccttcctcagactttgtcatatctggatgtgatacctgaaactgctgcatctaccttgcagccatgagtcaatccaggcagagggcaaaattgacactctgacgatggcagaaggagaaaatagaaagaacctggagcatggtgactttattgagctgctgattcaatcagttttaaagactgcccccactccagacttcttgttatataaatgaataagttcccttcttatttatgtatattttaataaaaatttatgctacttataactgaagacattaaaacttacctacagatcatttgtcattttttgactgcccagcatttgttcccccatctgatgccagcttttaggaatttgtttattactgttgtgtaagaagtaatcttggtaatagagtaggcttccaataaagaagcagaaaaggtcagatcctttctttccctctctctcgagaaccacagaatgggtgggtgatctgagtttgggtgaatgtttcaccccttgcctttaaacagctggcataagaataaaagaatacaggtgataatatttatttcaacagtgtgggctgaccagaagtctactggaaactttggttgctcctcttggctcactggaggttccttggtctctgtgcattcccaagcccaatcttctagtcttcttttaattcttcaggctgcacttaatatatatatccatattatcataataaattcccttttgcttaggttaaccagaatcgatttctgtattttgccaagaacaacaacaagtaactgactgatatcaccgggggcgggtgggagtgggggcgccttagttgcagcaccaacaggcaaaagtgaacttgtactgatacacacaggtcaatccaacatattctcatgtgcagcccagtagttttgctccctattacatctcgttttgtttatttcccctttctcatatatcaaaacccattttaaccttaaaagcacaacactaaactcaagactcttttcagtcataaaagattagacagttattgttactgtggctgctttaaataaatctcaaagggctgctagtggatattcagtaagaacatgtaatcttaagctccagatgttgctggtgtaatttaatttaaccttctaattattgctggcattataagccccaacacttccaggtaagtatatcagatagtaggaaatataacaaatgtcttcctgttttcctcagagcaattttaggctctgaaaccaacaaagggacatcctgccactatgcttttgtttattaactggtgaaaacatttttgtgagttagggtggttttgaggacctattcaagcagcacaaactttaaaaaggaatatataagtatgattagggtcaacttttggccaaagaataaaattcatggttgtgtatagcattggcatctcttgagacatttgtagaatcatgacacgctggagttggaagatcccttacaggtgacccactcaaatcctcaatttacaaataaggaaaccaaggtgcagagtagtacacagtgatttgcccaaagtgacagatgaaactcagacacaggtttcccagctctgagtccagactaacactccacatccaggtcttgctttattgtttcaattaaattcactgtaagtttcaactgtctggactgtcctttccccatttcttgaagtcctatctacccagatccagggcagatgtcatttcctgtctgaaatcttctccaattcctcctgtaagaagtaatcaaggctgttctcaaggctctctatggcacattgattccttcatgaactgcttgttatatcactgtgtgcatatctgtcactcccactagattataaattttttgagggcaagggctatatcttcatcttcaatcttattttctttataggtcctaacaggatttatgtgataaatgtttgttgagtctctctgaagtgtactcaacaaacatttgtactctcataaatgtttgtggggaattaatggttgaagatgtcagtcctcttgacatcttaacaagcacctccatggatacacagtgctttaggctaaagtagtcattaatggtcaggatttcatgtctggcattagactggtagaaaagatcatctgtggttgatactcctccaatcaaagcactagagtagtcactgacttcaattaccagcagtcttcccagacatacatataaaatggtaatcacaaatgtataattcaagataccttcaggtgcaaagaaagaaaagtgctactcactttgacttaaataataatgatataaattatctcatacaatgggaagcccccatggaggaaagacttcaagtttagctgattcactggccatatcatgtccccctaggctaaattctttgtatcccttacctctataatccttgatgttggcttttcctcagtcaggtttgcctgctggtgatgagatatcttctggtagcaatgaggactacacacttccttagtcaatgtgaagcaagagaaaggaaacctctttcccaactaggcaataaaaatctttccatttagactgaatctagggcatatgaccaacactagaccagttgcagtcactacaggacagtatgaccctgcctggctgagaaattcagaactgtccctggcactagttagtgtccccttagtctgctgagatgcttgagggaggggtggataaacaaacaaattcaggttctgttcaggagaaagaaagaatggaagggaatcatcagtgtacacgatctaagggtgacaattcttcaaattataaattagcacaaaaaaatccttttatggaattatgagtcgagttgagagaaataaatcagtttccttttttaaaaactcatgtgttataaataatagatatttcagtgttatcttttcattggatcgagtgacttatatcctagttacttacaaacagatcaggggaaaattcttcttttctatgcctattaacgtgcttttgggaacccatggcaatttataaatccctaccttgaacaatcattgtatcagaacattcacttgactgtgccttcctattcttctgagtttctatctatgcagcacttatttagagcaagcccttccttcccacctacgtatacacaagttgatggtgattcactgaaatcgtgctttgctaatcatgatgattaaagaatgagaggaacacattattgtgctgggaagtaggcatttttctcaggataaaacaaattgatactgaaaggcacattacttatgagtctgaaaagtctcctagcatatctgcagtgttcagtgctgacctctctatacagagtaggtaaatgctaggtttgggatgcctgttgcttcatgattggggatatttagaattaattctattttcacagtgaagcctgggtgcgctctcttcagtcacagaatgcttagcaggcatagcagtgagggctgcctttctatggtatgtgaagtaattcaaggggtacatttcctggggaagaaattgttctgtaagcatcggaaatacaatcaaacaaacatctaagatgggccggagatgcaatggctgctctcaaatgttaccgtgtttattctaggattaataaacatagaaaggaagtagaaaaccttgacaggtcttaatggggttcctgaggagggcagctcctagctgtgatgccttcctttacccatgcaggcaacttgaaaattctatgtgcaaggaagaaaatagtttctttgaggcagaggcagccgggttactatcccctatggtgatgccctcccaaaaggttctctgcaacaggaatgacaggctcacataacacgacaggaggctgggaacatttctttggaatttggaaagatttagaagcccttctgcagagacagggatcctcataggtcttcaatcacatgatatataaacagaaaaggagttataattctcttatatgtaggataatatgtttcaatgtaggattttgttgttacttagcatttccagaaggtaaagagaaagcaaatagtttacagctgtggaatatttttctcttaagtatattgtttatttattataccaaaacttcattcacttagaaagggtgtctctatatgaaataccaaattaaacttcccttatattcacatgattggtcattcagctgattaaaacttggttaattcagaatatggtttaaaattaaaaaatggatttctaatccctccattaattcaacacctccacttttgtttcttgttaatcgagaaaaagcagaactcattacctattctctccttatgccagagccctgatggttttaatcttcacttgcttcctaatttttttttctgtttttattttacaggtctctgctgaccacacttttcttacctctctcacccctggattttgtgccctatctccttggctctcctcctttcctctcaacagttccttcttacttgcccctgaggattcttttcttctgcctacaccacgttccctaggatttttccctctgcctttgacttctcctccttgccacagtcctcctgattgatcatcttgcccacacgcctgctgtcagcagtcacttttatgttagctcgtatcagtacttccagctccaacacttggctgagccacagatcctaacatgaggccctccaccagacattgctatttcatgtcccttgggtatgtcaaatttaatacagccagatctgaacttggtatttccccttaaatttggcgttccctgttccagagattgaaagtattttcacaattgctcaatgactttagaaacttcagtctcattttccctctcaacttccacatccaacgcctgaagatttaatctgttaaacatcttctatttcttcccctcctttgtattccactgtctttatttgggtttttaccactcgctatacaaattttacaattttatgacttttgtcccttttaatttgggattttccataaaaatgcaatccaattttttacattttctacactgcggccagagtgagttttctaaaactgcgtattttatatgacaccaccctcctgaaaatccttttgtaatattaagttttcaaagttaaattccatgggcagttccaagatggccaaataggaacagctccagtctacagctcccagcgtgagcgacacagaagacgggtgatttctgcatttccaactgaggtaccgggttcatctcactgggcttgtcggacagtgggtgcaggacagtgggtgcagcacaccgagcgtgagccgaagcagggcgaggcatcacctcacccgggaagtgcaaggggtcagggaatttcctttcatagccaagcaaagctgtgacagacggcacctggaaaatcaggtcactcccaccctaatactgcacttttccaatggtcttagcaaatggcacaccaggagattatatcccgtgcatggcttggagggtcccatgcccacagagcgttgctcatctcttgtagctagcacagcagtctgagaaccaactgcaatgcggcagtgaggctggggaaggggcgcccgccattgctgaggcttgagtaggtaaacaaagcagccaggaagctccaactgggtggagcccactgcagctcaaggaggcctgcctgcctctgtagactccacctctcggggcagggcatagccgaacaaaaggcagcagaaacctctgcagacttaaatgtccctgtctgacagctttgaagagagttgtggttctcccagaatggagtttgagatgtgagaacggacagactgcctcctcaagtaggtctctgaaccccgagtagcctaactgggaggcaccccccagtaggggaagactgacacctcacacggctgggtacccctctgagatgaaacttccagaagaacgatcaggtagcaacatttgctgatcagcaatattcgctgttctgcagcctctgctgctgatacctaggcaaacagggtctggagtggacctctagcaaattccaacagacctgcagctgagggtcctgactgttagaaggaaaactaacaaacagaaaggacatccacaccaaaaccccacctgtacgtcaccatcatcaaagaccaaaggtagataaaaccacaaagatagggaaaaaacagagcagaaaagctgaaaattctaaaaatcagagcacctctccccctccaaaggaacgcagctcctcaccagcaacagaacaaagctggacagagaatgactttgacgagttgagagaagaaggcttcagacgatcaaacttctccaagctaaaggaggaagtttgaacccaacgcaaagaagctaaaaaccttgaaaaaaaattagacgaatggctaactagagtaaccagagtagagaagtccttaaatgacctgatggagctgaaaaccatggcacgagaactacatgatgaatgcacaagcttcagtagccgattcgatcaactggaagaaagggtgtcagtgattgaagatcaaatgaatgaaatgaagcaagaagagaagtttagagaaaaaagagtaaatagaaatgaacaaagcctccaagaaatatgggactatgtgaaaagaccaaatctacgtctgattggtgtacctgaaagtaacagggagaatggaaccaagttggaaaacactgcaggatattattcaggagaacttccccaacctagcaaggcaggccaacattcaaattcaggaaatacagagaatgccataaagatactcctcgagaagaacaactccaagacacataatgtcagattcaccaaagttgaaatgaccgaaaaaatgttaagggcagccacagagaaaggttgggttacccacaaagggaagcccaacagactaacagtggatcacttggcagaaattctacaagccagaagagagtgaggaccaacattcaacattcgtaaagaaaagaattttcaagccagaatttcatatccagccaaactaagcttcataagtgaaggagaattaaaatcctttacagacaaccaaatgctgagagactctgttaccaccaggcctgccctacaagagctcctgaaggaagcactaaacatggaaaggaacaactggtaccagccactgcaaaaacatgccaaattgtaaagaccatcaatgctaggaagaaactgcaagtaacgagcaaaataaccagctcacatcataatgaaaggatcaaattcacacataacaatattaaccttaaatgtaaatgggctaaatgctccaattaaaagacacagactggcaaattggatagagtcaagactcatcagtgtgctgtattcaggagacccatctcacatgtagcgacacacataggctcaaaataaagggatggaggaagatctaccaagcaaatggaaaacaaaaaaaggcaggggttgcaatcctagtctctgataaaacagactgtaaaccaacaaagatcaaaagagacaaacaaggccattacataacgataaagagatcaattccacaggaagagctaactatcctaaatatacatgcacccaatacaggagcacccaaattcataaagcaagtccttagagacctacaaagagacttagactctcacacaataataatgggaaactttaataccccactgtcaacattagacagatcaacaagacagaaagttaataaggatatccaggaattgaactcagctctgcaccaagcggacctaacagacatctgtagaactctccaccacaaatcaacagaatatacattcttctcagcaccacatcgcacttattccaaaattgaccacatagttggaagtaaagcactcctcagcagatgtaaaagaacagaaattataacaaactgtctctcagaccacagtgcaatcaaactagaactcaggattaagaaactcactcaaaaccgctcaactacatggaaactgaacaacctgctcctgaatgactactggctacataacaaaatgaaggcagaaataaagatgttctttgaaaccaacgagaacaaagacacaacataccagaatctctgggacacatttaaatcagtgtgtagagggaaatttatagcactaaatgcccacaagagaaagtaggaaagatctaaaattgacaccttaacatcacaattaagagaactagagaagcaagagcaaacacattcaaaagctagcagaaggcaagaaataactaagatcagagcagaactgaaggagatagagacacaaaaaacccttcaaaaaattaatggatccaggagcagattttttgaaatgatcaagaaaattgatagaatgctagtaagactaataaagaagaaaatagaggagaatcaaatagatgcaataaaaatgataaaggggatatcaccaccgatcccacagaaatgcaaactaccatcagagaatactataaacacctctacctggcagagacacaacaaaagaagagaattttagaccaatatccctgatgaacatcgatgcaaaaatcctcaataagatactggcaaactgaatccagcaacacatcaaaaagcttacccaccatgatcaagtgggcttcacccctgagatgcaaggctggttcaacatatgcaaatcaataacataatccagcatatacacagaaccaaacacaaaaaccacatgattatctcaataaatgcagaaaagtcctttgacaaaattcagcagcccttcaggctaaaaactctcaataaattaggtattgatgggatgtatctcaaaacaataagagctatttatgacaaacccacagccaatatcatactgaatgggcaaaaactggaagcattccctttgaaaactggcacacgacagggatgtcctctctcaccattcctattcaacacagtgttggaagttctggccaggaaaatcaggcaggagaaggaaataaagggtattcatttaggaaaagaggaagtcaaattgtccctgtttgcagatgtcatgattgtatatctagaaaaccccatcgtcttaccacaaaatctccttaagctgataagcaacttcagcaaagtctcaggatacaaaattaatgtgcaaaaatcacaagcattcttatacaccaataacagacagagagccaaagcatgaatgaactcccattcacaattgcttcaaagagaataaatacctaggaatccatcttacaagggctgtgaaggacctcttcaaggagaactacaaaccactgctcaacgaaataaaagaggacacaaacaaacagaagaacattccatgctcatgggtaggaagaatcaatatcaggaaaatggccatactgcccaaggtaatttatagactcaatgccatccccatcaaaccaccaatgactttcttcacagaattggaaaaaactactttagagttcatatggaaccaaaaaagagcccgcattgccaagtcaatcctaagccaaagaacaaagctggaggcatcatgctacctgacttcaaactaaactacaaggctacagtaaccaaaacagcagggtactggtaccaaaacagagatatagaccaagggaacagaaaagagccctcagaaataataccacacatctacaaccatctgatctttgacaaacctgacaaaaacaagaaatggggaaaggattccctatttaataaatggtgctgggaaaactggctagctatatgtagaaagctataactgcatcctttccttacaccttatacaaaaattaattcaagatggattaaagacttaaatgttagacctaaaaccataaaaaccatagaagaaagcctaggcaataccattgaggacataggcatgggcaaggacttcatgtttaaaacaccaaaagcaatggcaacaaaagccaaaattgacaaatgggatctaattaaactaaagagcttctgcacagcaaaagaaactaccatcagagtgaacaggcaacctacagaatgggaaaaagtgtttgcaatatactcatctgacaaaggactaatatccagaatctacaaagaaatttacaagaaaaaaacaaacaaccccatcaaaaagtgggcaaaagatatgaacagacacttctcaaaagaagacatttatgcagccaacagacacatgaaaaaatgctcatcatcactggccatcagagaaatgcaaatcaaaaccacaatgagataccatctcacaccagttagaatggcgatcattaaaaagtcaggaaacaacaggtgctggagaggatgtggagaaataggaacacttttacactgttggtgggactgtaaactagttcaaccattgtggaagacagtgtggcgatttcttacagatctagaactagaaataccatttgacccagccatcccattactgggtatatacccaaaggattataaatcatgctgctatatagacacatgcacatgtatgtttattgaggcactgttcacaatagcaaagacttggaaccaacccacatatccatcagtgacagactggattaagaaaatgtggcacatatacaccatgcaattctatgcagccataaaaaatgatgagttcatgtcctttgtagggacatggatgaagctggaaaccatcaatctcagcaaactatggcaaagacaagagccaaacactgcatgttctcacccataggtgggaattgaacaatgagaacacttggacacaggaaggggaacatcacacaccggggcctgttgtgcagtgcggggagggagaagggataggattaggagatatacctaatgtaaatgaagagttaataggtgcagcacaccaacgtggcacatgtatacatatgtaacaaacctgcacgttgtgcacatgtaccctagaacttaaagtataataataaacaaaacaaaacaaaacaaaaaaacacaatgtttaattcaaactaataagcacaaaatgtcctctggatctatttattgaatactaatctcatctctccactgccttcctctctgatcaccaaagactccttacttcttctaggcacaattaaatgcttgttattcccaaacatacttccatttattcatgtatccagatccctgtggatggaataaaactcttttccacgtgtttaattagctgaacaggcaaaacccagctcaagtgtcaccttctctaggaagctgttttggattcctcattctgattaatttatagccttctcctctgagttatcttggttttaactttccactttccttagattaactaataataatttttattaactcatgaactcatgaagggcaaggactctcatttgtctttttgtcaacagctcttagtactcaataaatatttgtctaacaaatcaatccaggtgctctgaggaatataaaagacgtctctgacttctctgccctaaggaatcttaaatttttaatactagagttaagacattagaggacaattaaaaaatgcaaggccatataattaaaagtagaaaactggcatgagcttctagtatagcaaaatattataaaataaaatatattgttccttttattaattttttaagtatcttttggtgtttctaacattaaactaaagaatgttggagctctctgcttctgggagggtaggacacaaaagaagcatcaagaacaaaatgtccaattcttggctttgagttccaaaatatgtccttgaaattcatgacagagttaacagttttgaaagccaaggagctcttgatttgtaagagctgggccttttgggaggaaaaaaaaaaaagatctgtaagttgtagtaaagtctggaagccttaacatgtggaagttatataagaatcttacagtagggtaagctacagaacatgatacaggacgtagaaaggaaatcaacaccctctaggaacaaggggtggggattggagagagaatgtcaaaagatggaagaaaggctagacatgagcatgggctgcctgctctctgtctcccactctaggctgagttctttagaactagatgtcataacatatcagataagttgagataggtggtagaagagaatcacaaggtagagccagggaagcctgtgcttatcagaaaatcctcattctgatgtgccatttgtgaggtagtgtcagggcagatgaatctcaggtcagactcacaggattcttcacactccagcagggtgtgaagagagcagctgagaggttttctgtttcctttatggaaggtccataagtactgagaaggccataaaaccggaagtcaaaggaggactatgaatactaggagataccaatacatagtggtacagaccacataaaactgtcattggtcagtgaggaaaacgggggcctacaggccaatccctttgttggaatgcagatcatcaaccaaaagaaagagaagaaaaggatggaagggagtcttgaatcaataacatgaaaaacttaactgaccctggaaatgacttgtttacagtaagttgacaggattaacactattagcagaaatggaggtttatgtgcaaagatatatttagttaaaaataattaaagaatatcatatctttgtacatgagttgtgagtataaataacaacaaacaggagaggttaggatagggagagttgtcagagaagggtttgtgaaggaagcagaattagatggggctgtttaaaaggcaggaagaacttggctcaggaggaggaaagaatgtgacaggaaaaaagttgtccaaaggcctaaacctgggactagcaggagtcagtaggactaataggaatacagaggctaggatatgagaggtgagatgcaagtgtcagattacgaaggtccttgggtgcaaagatgaggggcatagacccttcaggacttaagcagtctgagtggcatttgggaaaggattcattcattagaggtctgcctagcaggaagaaagataatctacctcccaaatggcaactttccctctgccttctggtatgcacactcctcccatatcatggagactgagatagagggagttttattcaccagaatttgtagttggggatagaagtgactggagaagacaacgtggtttggctgccccatcccctgtgagagaagcccccaccgcatggggctttgtagcgtacgtctagagcccaggttttggaagggactggaacataaggaactgatccatgagatggaaatgtcaaagagagaagggagccccactgagcaatgcagccaaagaaagactttagggagcattcagatgtctcatgggatcttgaattgtcttctgggtaatatgcaatgtaaattttctcatatatctcccacaatatcttcaataaaatctataattctttaaagtggatgtaagaagtgcagagtgtagtttcagggttggtgcttctgtaaaagctgtaggtagcactgaatcaagagggtctattctctgccccacccatcaaccctcaatatacacatataaaacaagtaacttgaccctattgcctatatggcttaaaagttaaacatcacagaatgatctacacccactacctttatttttcctttcttctccgatacttttctctgatgctaggttgacaccatggcaactagtacagtagaaagaacttgggcttcagagtcaggcttttgttcgggtcccaggtgagccacttcccaggggcataacccactgcaagttgcctaactagaaggagtctctgtcttttcatatggagaacaggaataacacatattttacaatatcctcgtaaggattaaaagagattattatatgtgtggaggttaagcaatacagtagaaagggccctaactttagagtaggtctgaatcttggctctcacaattattactttatgtgacactggtgaagtagagaactcttttgagactcagattctttatctgtaaaatgtgggtaagagatgactaatgatagtctagtacaaagatcatatcaagtggtcatgatcttgttagggttcaaaagtgggaactacggtgatgtaaagtgcctagtacactttgaaggcacattgaaggtacacataaatgggatccattactataatcacacactgcatgctctggaagttctggcttgacagagtaataaaatggtctgttgaatgtacagtttgaggtaacattttagggagaattccctgaaaggaagaggttccatccttcaggatgtagtgtagactttatgtatgtccccagtaggaataaaacatgggaaggtgtaaaagtgtaagtgatcccacttatcatcactcctaagtgacccacagctgttcctacaactctgggctctgcgacttagaaatcctggtttctaaaggggaaatgcttcatctagataacacaataagaagcccattaaatctcaagctatggctaccaccccgtcatgtcatgttgcttgagacaagacccaggaagtgagaagggtcaacatcctggcaaatataaccaacatggatcatcaggcacaggttcggctgctgctacagaatgagggcaggaaatatgttcaccagtcaagtaattcggtgtctcttggtactctcttgctcaattttgatgataaaaatacaagttcagtgttatggtctgaaaagaatgtggtgatcatggggctcaaaaccatgtccagatcatcccatatgtaagccacctaaacaggcagaggtgctagttgatggtgaggggaattctgaatggttggatagtggaggagaaggataatgagtatttgttaaggccatgagaccagctgcagtggcaggagctgtagctcatctcactaatccacctgaaggcctagaacttattataagaagcaagcgggtatgaatggttgcaaggagtacaccgtagtggataccatggaatactgcctaaatttctacctccaaaactatagtacttacacctccagctgcaggaagttttagaaaccaacagctcttagtgacattccctctaagggtcatatgttcagctcaagaaaaccgccttacccaaagtcatgctccttcccggcggtagcccacatccaatgactgggtgatagaagggtctaaaggcctgtccctttgcttcccatttagggaactttaaggagttattgcagctgcaaaggtctcactgggatcatcagagactttgttgtgattgaatggcagttcaagctcccttcagcccaatccagtttctttcattctcccataggtatccagccaagagcatcccctcttcctgcatgcaaatcttgtccagagcctgctttctgggaaacctaacctgtgacaaacatgctatttctgagtatctgcagatcattcatgtggagaaatttgctccttatttatgtgttctctgctggtattactccttctactctcgtaacaaagctgttaactagcattttagaatcactgatgacatcctttctttctaagttcttcctctaaatttcctggtttgatctgagttttcttatttagtgctttcaaaatattcttgagtattaccactgcactctgtttatattacctgttttttaacagcagagactctttgtattctcactgtttactatgacacagtaacttgttgaatatttgtggaattaaaaacaaacaagaacatattgatctagaatatgaatagtgatctggttggcaatatcaatttcacagagttattggaatacagactagaaactatgggagtggatgagattcctgatggattatgggtagaattagaagagaagatagcttatcacagaaccctgagaaataccaacacttatgggctgaaaagagaagaaagagtccatgaaagaatggttggtgagagaagagataatcctggaagcctagggtagaaagaaattcaagaaagatgtattcaacagagtcaaataacaaattgagtatcaaataaaacaaatgactatcagatttgataattaggaggccttggtgccattttccagccatattttgatggcattgtgggaggaaatatacaggatcaattttgtatgtagatccaccttttcccttaggtagttgctgtatccatgtctggagaagtcagaggaagcatggacttcagcttcctgtttaagccatgttctcacatcccattttagcaggggctttgttctttaggagtccacagggttccattaataatgctgtgatatccacttggctctttgtatctgttagaatttataaatggcaggtaaatgattatgaccttcaaacctccaacaaggtcaactccttactgaaagttataaagcctaaccaacaattacccagagctcaaataaaccagaggtgcttaagtcactcaggggaaacatattaaagtcaattacaactcaatctgggtagatttatcagacatctttcccctgtgaccaaagaggcaagaagtagaacttgttccaaagtgtggggataaacgtaggggtgtatggaggtctggtagataacacagaagcaaggagaatagatgattcctgcctattcccctaagagttagttaagcaagtctggacatatttcctgaattggaactatttgatctatataaatactcatttttattcaattcaacagctatttattgaatactgttatctgtcaggcagataacagatatactaggaactgagaaacaagattgaaagaataaaaacaagcataaaaataaacaacatatgttctgttctcaagaagttcacagactagtagctagagaagcacacaaactgccatataatttcaaaggcactgtgagagtagtatgtactaagtactatggagccacagagaagtgggcaattcagccagccttaggaagaaggtataaccaggatggctacaggtgtggatgtatctcttgcaggttgattggaatgatggacaatcaaagtaaagggaaaaaaaaatcaattgctttctagaaaatttatagaaataaacgttccaaacctactagggcaactagttcagatatttaaaaacccatgcaagcaaggaattcttcctgtaattacctctaactacatggccttataattaatttttttgttttgttttgagacagagtcttgctctgttgcccaggctggagtgcagtggtgcgatttcggctcactgcaagctccacctcccgggttcacgccattctcctgcctcagcctcccgagtagctgggactacaggcacccatcaccacacccagctaattttttgtatttttagtagagacagggtttcaccgtgttagccaggatggtcttgatctcttgatctcgtgatccgcctgcctcgacctccgaaagtgctggaattacaggcgtgagccaccacgcctggcctgtaattaattttaaatcctcccttttctctttttcctcatgagaaaaaactgggaacagatagtcaacacagtatttacatttctgttagaaaaaactcccagtgacttggttatttcccacaaaacaaaacaaaacaaaacaaaaatcgctttatcccaatgcatgcccactcatcatttgatctttttgttttaaaatgaatagtaatctacctccattaaaagcctcccaagaggacttagctccagtgagcatcgaacagttttaactgatgggctcaagggatggaagaagctggatgagatgtcagcaagaacattctttgacaaaacccagtcctaagccaaattcttaagatttggaaagaaaataattttgtcttactgccagcagactctcctgttttctgtttcaactaagcaaattaggaatggttatttccatgcaatgtctccccatgctgggcactaaaactcaaggtactccaaagtatctaagaaggttgaataaacacccaaagctttagcaaaactaaaattcttatgggtttcctgagtatactttcagtttacttttattactattacaactttccttaattttatatatatgatatattttatttctatcatatattttcttgatgatatatataatatttatttatttattctcacaatgtaatagagggtatattgtatagaaggtaaaaatatgagtatgagaaaatgttagaaattgtagggaccatggtgattactggcagataacgcaaaaccaaagttacacaaatgtcaaaggtcaagtagcaatttaagagcagagctgagaatagaattcaggtgaggaaatcaggtcctgtgcctgtgacatcacaggtagggccgcccactatacaactcaaagggtagcatttatacagaatgggcaacatacagcaagggccaggcctggaactgacctttgtggggactctcatgagtcctataatgcagcagcttcagtcaccagaaaccttgtaattgtctcattattcttaaatttgagggacctgaccaattttttaaaaaaattcaaagtgagcagtgtactgtcagttttggtcccactatagggttggtttcctccagaaatggaggctttgtggtgtacctcaccatcagaattcttaagatttaaaatgttttcttcacggccttcttgcacaatatcagtggcttttagaaggatcgtattgagtcatacttgtaggatttatacagcataaaccttccaaatggtcggtgaagcaaaatagaaaataaaggcagcctccctcctccacccacattttttaaaaatccacaagttttaggaaaaaatccagctctagctaaaatccctgaagcccttgtgaaacctcaagagtttttcttcctcaccatgacccatgaattttcatttggtggtgtggcagtggcttgagggattttaacttgaagcagtttaccccatttactctgttgtttgggtgacatagttgatactaaacaacaaaattgctgtacctccctaaaacatgaacatataatggttgtttttgtaaagagtttggggatatgtgtggctaaaggaggtaataaagtataacaaggtcacagtaaatgctagttcattatctgaagcactggtccacctcagtgagaaaaatatcagaagcggggtggcaacaatgaagataaagatgatgcaaatcattaaagaaaaccatttgccacctcaactgcataataaactcaatacagcctgctgtagtcctacattcatggtaaacctaacagattttctgctgaaaaatgcaatgacgttgaaaccaatgcaatgcactgtctctggtgtgaggtaccttacaaggtaaaggatttagggtttatgaggtttctgttgttgatattttataatttttagcaaagcatttgagttttaactcagacccaggaggtgcattttattagaacgtttaatccttccaaaaggctttgtgaaatccctctcctctgatgtctccctatccctatcagtcttcagcatctaggtgtcccaatcaacaaagcctcctgaactctcaaacagaacattctgtagcagctgtgaatgtcttgaagctagatttgacgtcacagacagcaggcagcacagaggagacatgccacctgttggtgccaagcgtgtcctaccttggaaacatgagcaatcaatgtgctgacctttcttcctggagagtttgaggtcaggcagactccttgaaaacaatgccccatttaatatacacccttaagcctgaatggtaacatttgcatatttttactgattcctcacccaaattattttcctcttcaatgaacctgtccttccaggacatccatcatgggttggatgccaccccatctcccatctgggttagctttcccttctagcaggacatgttagccaagtaggtttcaaattgttctcattggtcattccccacaatcttccaactaggtagtgccacatccattctgcagaacatgtgtggcagaagcatagcaaaacctaccagtgccaagattccactctgttggacagattccaaatggagcttcctttctgtgaagcaaggaccctcacgcacagttccttcctcctccggtaatgtcttccccctcctctttgcttctttcccatccctctatctctaaacacttcctacattcacacccacccaatctctctgaagaattcatcctgcctctccctagctgcaccagcctgcagttctttctgcattctctgctgaattcttactggcatttgtggtaactgtgctggtaactgtcttatactggacgtagtacttggtgtggttaattttctttttctatatagaggtattgagttcagtatgctatcagctctgaaaaatggggccttgtctacctgtccctacagggtcgagaagaatactgcacacaaaggttcacaagaagaatagtatttgtgtatggattatgtcaggaaaaaaaacccatgataacagtcctcaaccgggctttgaaaacagcaagtatgttcctcaattctagttttgctttggtttatattttagatgtgaacctctagctagaaatctaagggcatatttcacagaaaatactagaaaatggcatataaaaatggatggcagaaaactttttcaagtggaaaaggaagaaaggaaggaaagaaagaagggcagactacctggtggtataggcccttatatctagaactctcactcaatgcttccaacactttttcataaaccacaaaaccagaaatttactgttcaataacagaaacatatggtgtggagctttctagctttttcttttttcttttttttttttttgatggtaaagaggtagcaaggagagaggatctagttggggaggtgggtaggacaagaagaagtgggagtgaatgttttcaaaaagcttttggtagataaggactttctctcattcatttttaaattttcctattaaaatatgtactttatagcttctcgactttacaagaggcatgttttttgatggaaacatattctggtgtgcacagtgattaggtccattagtggataaattcagcgttcactcaagagaccatgccacaagaccaaatccactacttttattggaaatactggggctgagaaagagagtaaattcattaatgctaagcctatacaaagcagtttgctctttttgtctgtttcgtattgtaccattgcagaaaggttgagtgtacctccgctactaaaacagtccatgtatccagggagcttgctaatcaattttagagtcaacagagccccaggacaccgttaagaaattcaaggttttcagggatagttgaaaaagaaaacaaatgactgggcatgttcctctctgtgtttcccttccactgcttggaagaggacaaacagtgttcactggcgacggacaatgtgatgctccattgacttctttccagcacagtttaagctatcaggtcagccttctgttcactgaaagacatttgtgtttctacatatctgtactcacgattaaagggcactgaatcactctagacctttaacagcactaaatgggctattaggcaaaattgaaattgaattccctacaattcacagctgagaaatacatggccactgaataattacctcatatcccagacactttctggtgtcttttagactgacactggaaaaagaaggcaaaaagggaaaaagctaatactgatgaagcatttttttgagttcagcatggtgttaagcagtttattagtttatttaatcctcgtgagatccttcagacaggtgagtttttatgcttcttttacaggagaaactaaggctcaggtaggtaagagaaccttgtcaccatgagataatgtgctgtggccatgcaagatgctagtaaaacatccctccataaaatctctttattagacaggagagaaatctgatcattacactttccttcttttctaacttctgttttcttgcttgttaaatgaagaataatgacatccccaagtggttgttgtgaaatacaaagagaatagctcttgttatctgtacatttgtagttccttctgcctgacttttcgcatagctgtctcctactcatcctttagttctcagcttaaatgacattgcctccaagaggccttcccagattatccacctgaggtctcatcaacctcattatcacatcacaactcactatcacatttcccgtttatcaccttaatagcacctatcacaatctatgattgcctcattactatccctcctccccatcagaataaagcctccgtgaaagacaagagcattcctatattgctcatgttctatgcctactacagtgcctggcatatagtgctacccccaaatactagttgagtgaatgcatgaatgactgaaagaaaatgcacctataatttagaactactaaataaatgaaagttcccttctatttcccactttccctctgactgtttttgggttcacttccatttgacctcttttcatctcagtcaccagtgatcctgtatcatgttacactgaacttcagttgatgcaggagaggaaagctgactttgctcctgctctgtagcaaaaggacttggactgtttctctctcgtctcagggaagaggcctgtctatactgggcctgagtacaggacatgtaagtgggtacagatcaaagatctggtgacaccctgtgtctgtggaaaggtggagatatttaacaatgggagggaagaagtggcttctatggtgcagagaaacttgccctgacctccttcatccttttcagggagcttctgaaaatgtttctccacagtgccaatctgcccttagcttttggggacatgcaatggctaaaagcccttgttggatactgaacttctaaactcaagttatgtcctcaaggctcagcatctatccagggctcaagcagaaattaaaggttgccaagggctaagagcatgggaagaggctttgggtgtttttggttgggctctgctctccttgcatgaaattgctaaccattcaaagtcaagttgaggtaaaaatgaatggtctgaacacccccttaaagtccaccaaatttaaagcaagcaggctttctccatgaaagtcggcttctcttttacttaggtaacctttcagtaatcatagatcaaagcccaggctgaacgtttctatcctttgggaaactttctctggcttccttgggcatataggagagttctaccctttcccacaacaccatcttttgcctctatcagggtttatctatcttgtggaatagtcacattcttatgtgtcttgcaaccacatccagctgttggtccctggaggcaatgtgtctcatacatttttggacccttcaatcaagatctttgtatcttgctaaatgctaggaatataccaagtacacaatatataaagtaggaggtatgtttgaataataaagttttggagataaaagggtcccaactcatagtttgatattttatgaagcccaaagaaagataaagttattgcccaaggtagccacaaagtaacagataggatctactcaaataaatattatttattacttgaaattacatcatcatgaaaaagacttcccaaaagttttaaaatgtaaagcaatttgaaatgctttctatctaattataatgcttagactttatttaaaatctttcacagtttcaagggaccatatgctttatgcttctaagaatttgtcaaatagttgttgccctataaattaagtattggttcttctattactcttgagaatacatgcttcgtgaatactaatttgggttaattttttgccactttatatttgtgtgttttgacaaaccactgaccagacaataggtatatagactatattagatatacatatttttaattttaaacttttaatttttatgggtacatagtaggtgtatatatttctgaggcacatgagatattttgatacaagtatgcaatgtgtaataatcacatcagggtaaatagggtatccatcaccttaagcacttatcctttgtgttacaaacaatccaattatactctttatattagataacatttgatttgagacatcttctagtcctaaaattatctgcctccatcaactcttctatgttgatttcatctttaatgaacatttattggatgtttaatgtatcccaagcattatgtccaggattctctaccaggtactaggaaaataatatactgtcttataaataagatagacaatccagttctcaagttactcacagtctaacagtctaatggaggagtcaggcattaaaaaaatgattttaatgaatgtaaaatactacaatagaggcatgtacttaatattgtggaagcagagaaaagggaataataacctgcctgtggggaattagagaatgctgccttctaaataaccttttaaataaagtggagatggaagttgaggatcaaaaacttatcaagaattcactcaaagtaaatgaaaatatttgtcctgctaaggaaaaaaaaatagacaagaggaaagcctataaaaatcaaatcagtatctcaaggtgatgaaacaattctgtatattcttaatctccaggtagtgtggtcttgaattatagggactttatttaaaagtacatgatggatttaatgatagtaaatgattaaagtaaatacttgccacttgcatcttcctttccagatagatgggaaaccatactgcctatatttagatttttcctgtttaatgtcactaaacaaagcattaatcttttcttaagtagactgtgttatgggttggatctatatattgaagtcctaagccccagtacctcataatatgaccttatttggaaataggatcattgcaactgtcattagttaaggtgaggtcatactagagtaaggtgtgccattaactcagaataactggactggacattttgacccagatatgcacacaaggagaatgctatgtgaagataaatgcagaagttatagtcattcttctacaagccaaagaatgccaacaattaccagaaaactaccataagctaggggaaaggcatagagtagatttttccccaaaatcctcagaaggaactaaccgtaccaatgctatgaagacttctagcctgcagagctgtgaaacaataaatttctattgtttaagccacccagtctgtggtactttgttacagcatccctggcaaactcatacaaactgtaaattcttcttggaaacatgatgaaggatcatggaaattttaaactagattttacacagtactggaatatcaacttcactgagaaaaataatacctaaagcagttaattgagagattgctactcatttctaagtttatgtagtaactcagggcattcaaacatataataaataatttttttcaatgttaacttcaggtcagtctagtatttggctaaaaaataaaatacagttttatatctcttcatcctaggttcttaagttacctgtatgtgtgtttatctctgtgtgtgtgtgtgtctgtgtgtatgtgtgattctttggaaacttaactctatgatgactttgaggcctcaaaataattgccatttagcaagagaatttctctttaacttttcttcctaaggtacaatattgaccatcatcttaaacaaacaaaccttgagtatgtagaacaatgaaaagagtgccaagctagatgtctggaaaccaggagtctagcctcattttggtcctaataaactgtgtggccttggacaagtgcttaattttcaaatagctattagctcaagaaaaatgcgggccagagcagcttttgatattgcctatgatccactatttgcaaaaatagctaatatccatgcattaaaatgaaaaagagctcagcagaaagcttgtagaaacagcactggaaatcgatatcatcagcaagggaaagaagtgatgacgagaaaaatattcctttattttcttctatttaacaaaagaatctctgcttaccattttcctcttcttagtgtacaagggcaactttaaaatgtgagttaacaaaagcgaatgattcagagctaatattttgttgtccctaaagttacagcagcatcaaatgattttatagcccactggggccagaaaaatcacttggaagcagagcatacctacatgagcaagttgtactacataaagtgacaaatgatcttagacaattacagaaacatttatatctcaatcagtaccctggagacagctgataatgtttgcacatactgctaaaaccgtcagcaataagatgtgaggaaaacccaaaccagaactttttacaaattatgaggttctgaaaaagagcagaaacctctgtggtaacggcttacattaacaatacagctgcctcttaaagctcctcaagtcataaaacactaacagcaaagaactgaaaaaaaaatgtgcacactacaaggaaaatgaacgtcagtgaaaatggacttcacaaggagtatggtggctgccaaactaaatgctgaagactggcaatcccctgatacaaaatcagagtcaaccatgacatgctcatagggaaggacatcagtgggcctgtttatctcatccatacagcatggtgcctaaaggtggttcaaactggaatggctgggttcaaaccactagccatggcttgggcaagtagctagtttctttatctgtaaaatatgaataatggcagtgctcacgatataggctgttatgaagattagatgagatagtataggtaaagcatttcgaagagtgcctcctaattgaatactcaataaatattattaccataactcctattattgctactagtaggcaatgagcccttgtcaaataaaacaagaccgtttttccaaatatttaattaaaaccagaatgtattctagaatgccagcaactgaattcaagagttgttatttaggcacaaatccctaaatttaaattttgtttatttattcatctcgtcattgatttacataacaaataattcttgagtatagtgctaaggtagtgtcctagcactagggttccaacaatgaataagatatatagtctctgaacccaaagagctcatcctagttgtggagaatagacagaaaattccaaggatccacatttgaactatgtggctcaagctatgtgcagtgccagtaaaaagagtgaggagagaggcaagaggatcacttgatccagaataggtgggtgcagggggatggtcaggcattattccctagagatgatagctggactcaaatgtggggtaatcctgttttagttagaatacagatggccaatcgaattgagggtaatagccagaataccttgaatcccttagtattgttgacaaagagcctaaaatatgttcttaaagttaatgcctgtctttatttatttatttctactattagtagttgcttacacaatctttatatgtcataattgtatattatttgcttgtcaaaggaaatattactcttaatgattgcagcatacagttataaataataatttacttcaatcagtcacacttgtgtaaggtattttgggatacatggagtcctagggcttcaggtcaaccactactggccagtaatgaggttctctaaattgaaaccctggggcagagctactctgccacaccattgtgtaactggggtttagttatgccacagtcaggcatgaggtaaaggtgatgagttctgtatccattgttagaaggagaagacaaagagggagaaaaggacattcactatgagcagatgggatgccagggagagatattaggtgacattgtgggaagtctgattgtcctgcccaatatacccattagaaggacaagctaaactggagaaaagcaacagttcctttctgaatatggggagacagctatcattgaaaaaaagtcccacaccaataagcaaaaataaaaaattctgtcatgagggccggggatagtataatagctcacacctgcaatcccagcattttgggaagctgaggtgagaaaacagttagagctcaggagtttgagaccagcctgggcagcataggaagactctgtctcacaaaatgaaaattctgtcatgaaattgatcaatgtttatgttaacatagacatatgacagacattttagaaacagccttggaaatttttcagtgaaagcacacaaattgtgaatgggcttcctattgttcaattcagctttccttcctttgcaacccgcctccacctttaaaaacgagcaacaggctcaatatcttcaaagaatggaactgtgtcccaccctagttctgcacaggaaaaatagcacagaacatttttctcccttcttattgagttgtgaccccaaaagtgtattttttaaattcaaagagtcctccaaacatttggtaatttaaacatttggtttaaaaatatatgaacaaactaggttgcatttgttagaaatcaagaccacttgggaaaaaatagagacgcaaagaatgtttgagcacagtggatgcttcattctttttaaaaccacatttcacttgctcaatgaaaaataaaaaaaccttcttttatttttaaaacccctttcaagctgacattgtctatgaccaagccatagcctagagcacaattttacagctgagtaacaaacctcttaaaactcagatttataatggaaatgctgtccgagagttaattacagtggactccagtagggtacaatttttttcatcagtttggagtttggaaagctcactagcctgacgcaaccatatttatctcaaacctcagactccattatttcattttgttgggctgtaaggcaaggccagtgagtaggtccctcttacctttgctttatagcctcagtttgcctgaagctttcagaaaaggaaaagtttttttcaaaaaagtccaggctctacactggtgttgtgtgggaaattaaaaaaaataaataaaagaaagaaaaaaagagtccaagatcaataacaggaactttaaattaggatagcctaatggcaggaaagaactcctgcctgctcttaggggagaaagcacaaacacactcaagaaaaacaaaaccaaaaaatttttaaaaatcttaacaactatctttagacttcttttaggactttgacagggtagggtttactcttcctaggaggtctgttttccaaaagcacacctggtgcctcatcaatgactacagaatttagcttgtgacctaactaagagactaactgagacaatttaccaaccttttgctctaagccagtgcctctcaaatactggaatcacctgggggaattaaaaaaaaatgcctgagtcccaacactagtgattcagatttaattagcttgggtgcagcctgggtgtcaggagacttaagagctccctagtggattctaatgagcagccaagactcaaaaccaatgctctcgccctttctttaaagtggggaccatggaccagcaacatcagcaacacgtggaggcttattagaaaggtagaatctcaggctccacctgctgagtcagaatctgtattttaacaagatcttcaggagatctgcatgcatattacactttgggaagcattgccttttgctacagccattccaaacaatttcctggcagtcttgcaagaattccaaaatacccactgaaaatatgatctgcttaacattccttgaaataaaaatagatagggagtgttccttgatccgattaggagttgaaaagaacaacaggatgagactgatggaaagagcttggtgcatttcaggtaaaggcagaaagctttaacctccttagagagcaaaaagtagaactagattgcttttgctcagcactcacaaattagcaacaacaaaaaatgctctggggtgggctcaaagaaaaatgattttaccaaacatctaatgactagcataacatgatcattgatgaatcataactcatttcagccactgttgctccacaactccctaatcatcccacttcctggctctgtatctcccctggaccaggagcatagaatttgactttcagttatccggtaacctaacgagaatgtatgtcaactatgttgacaactagtcaacatgatttataataaaactgaccctggattggtaagtggcatctagactaatacaactacaaataactgataggaaccacagttttggtctttctgagtgtagagctcttgtaactggatgtgtcctttactgggactttgaaagctatgcttatagatttgctgtaagagctactggcttctttgagggaaataaggcttttacaccaggaaaactcctgcacttacctagtatgcatctcatctctttgcacatgagctgctatgggctgctgcaaggcctcctataggtaagaaataaccatcactgcccttctaggaagccatgttcccgtactacgtccctttagagtagaatggtgaaatgggcttatgaatatgaatgtcaagttgaaccaagaactcttgatgcagaatgtgcaacacagagtttttttaacatagcataaactgggaacaaactaaatgcctttgagttgttaaataaagtatggtccattgataaaatggcatatatacagttctaaaagctcatgtttttgaagaatatttaatgtcagggaaaataaatgttcatgatacattaaaaaatgtgagagtggatatatggtacatatataccatatttattttataaaacacacaaggagtttcaataaaaaagcagataaagagagtaaagcagcatgtcagacaccttatgtattgtcatcttttcactcccttcttttccttgcagaaactcattttcctcactcaaataatgtgattcatgtcattctggtcatcacaaagttcagtgccctggccacagtgctcagcctgggatccaggctgattaatagaggtatcttatccccttttccacagtgactgtttgaggcatgtggctcagatagagacaatcagagtcattcctggggatcttgactgtataaatactgggacatataaattgaggctcttgaaatatctttggatagagagatgagaaaatacttgctgccagtgcccaggttcctatgacgagggaagcagcagcattctatggggtgctcaggtacagacagtcaggtggcagaagtgttatatagttgcacaattaaagaaatactgaattaaagaagggtttattgcaggacttctttgatatacatattagcactagcataaggagaggacgcagtatacagtgtctgtcaaatttacttaaacatcaaaacctttcttttttcttttctgtttcttttttcttttttgagaaaacctgctagcatctctgcttatgtgattgttcttagaagacaaaaaatatatgctgctccaaggaaataatggatccatctatgggtcaatatttttatgtgtgtgcgtgtgtgtgtgtgtgtgtgtgtgtgtgtgtgtgtgtgtgctttgctccactttctaaatttcttacacctaaagttatgttgaatacatacatacatatatatacaaagtatatgtatatagtatcttatacatatacatatgtatatctcatatatatttatatatagtctgtttctataagtgaaacaacccaagtactctttattttcataaatgaattagtagtatttctaacatatattaatagtttcttattgcccaaagtttagaatcaagagtccctttccttttacccatggaaacacacagattttatttttaatttcagttctccattacatgtttttttttaagcttttattttaagttcagggatacatgtgcaggtttgttatagaggtaaatagtgtgtcaagggggtttgctgtacagattattttgtcacccaggtaataagcatagtacccgataggtagacacatgaacacatatgtccatcacagcactattcgcaatagtaaagacatggaatcaacctaaatgcccatcaatggtagactggagaaagaaaatgtggtacataagttctctgttttatataccctgcatgagggcagccaagttaatgctataatcatcacttagtgtatttgggagaaaagaagttacctgttacctgttctacaaattaataaatatttctgcatttttgtttcctatgcaaatgtacatatacacacatatatggtttataaaaatggtaacatactatacaaatgttttgtaattttaattttttttttttttttgagacagagtctcgctctgttgcccaggctggagtgctgtggcacaatcttggctcactgcaacctccacctcctggattcaagcaattctcctgcctcagcctcctgagtagctgggattacaggagcatgctaccatgcccggctaatttttgtatttttagtagagacggggtttcaccatgttggtcaggctggtctcaaactcctgaccttgtgatccacccgcctcggcctcccaaagtgctgggattacaggtgtgagccaccacagccggcctgtaattttaatttttaaacttaatgaggtatgataagcatctttccatgccagcgtatagagttctaccactcttcattaacactgcctggtataaattgtgtggatggagtcatatatatcttagccctgtaatctcatttaacttctaggtacctcaatgtttgtctaagtaaaggtaacctacctacaaggaagattttcaaggaaaatatttaagtaaagcacttagcacaaggctggaacagaatgtgctcagtacatggagctatatcaatatatctattccataatattactattaagggattattctattaatattgtcattaatagataactgaattatttccaattttgacttcaataaataagactgcaacacactaattgcagccttgggtgtggatttctacagaataaactccaaaaaagtggaactgctaggtcaatgttatgcccattttaagttttgctaacatggccaaatttcttttcagagaggccttttccagtgggcactctcaccagcaatgggtgctgcttgctggctaccttttggggaaggcaaagtaaggggaagggattttatcagtctctggaagaatgtatagagtactgtaaggcgaaaagagagggccattctgtggagaggtgtcacgagttcccaaggccactttcaggcttgatgattcatgagaagaacttacaggcttcagaaaagctgttaaattcacagggtatcgtttactatagtgaaaggacgcagattaaaattagcaaaggaaagggagaaggtacatgtttggaagtccagaagaaaccaggtgcaaggtttttgtggtcccctccccatggagtctcatggggatgtgtctaattctcccagcaacaatgtatgacaacacatgctcaatgttgccaaccagaaaggctcacatgagccttggtgtccagagttgttattggagatcagcaatataggccccttaactgacctcagctactgagattccagcctccccctacctaaaagaaaaaaaaaagtcttcaccataaatcacatcgtcaggataaatttatctgtacagcatggtccaaggcctcaggcatacaaaaagactcttatctggaagaatatttcaagagctcagaggttaattcccaggagctgaccaagggctagtcctgaaggcaggcatttctttgaaatgtgcaggatttgaataacccaggcctgctgagttaaccccttccttcctgcccagggctgggaaggggatggcataagcaaagcagtgagaaggaggtgtataaagcacaattagggacaagagtgggatctggtattttaaagagaagaagagaaggaaattaaggggaaaagtaggttgagtcaaatcatgaagagtcttaaatacagataagcacaggtttgaggaagattaatctggtagtggttttaaagatgagttgaagtcaaaagagtctggagcctggggaacctgttaacaagcccgagacaggaggtgctaaagcagcacgataggcatgaaaatggaagggatctgcccaaacaagacttcaagagttgccgaaaataggtggacaaaggtgaggggaaggaaaaggtaagaatttcctaggaatataagcttctgtggttataggtaaaagcctctgttgacaggaataaagctgttagtacagccacattcatatattcatatagtcacattcatatattcaacaactatttattagaggcttattaagtaccaaactatttgtcttcatagtgtgttccatgaactacaggcaccccatcacctgggggagcttgttgacaaagcatttcactcttcccaagagctactgaattcaagtctctagcacagggtttggaaatctacatttttaacaagcactcagatactcttatcacccacaaagtctgaaattctctgttaattatgggtcccagaaaatcgtctatgttgggaatttaactagtcatgcataacttaaccgtgaggatatgttctaagaaatataaggcaattttgttgttttgcaaacatcatagagtgtactaacacaaaccttgatgaacagtctactacacacctaggctaggtgatacagcctattgctcctaggctacaaacctgtacagcatgttactgtactgaatactgtaggcaactgtagcaaaatggtatttgtgtatctaaacacaggtaaaaatagaaaaggtacagtaaaaatatcgtaggataatcttataggaccactgacgtatatgtgatctggtgttgactgaaacaccattatgtggcacatgactgtatatctcaaacggtgaaaataggaagaagaaaaatggcataaagaaagatcctttttttcctaccagcaactcaagatgagagtttgtcttgcatgatatgtgtttcaaatgtaggcacttgggtgaagcagaaactaccattttatttttctgggtagtaaaacacacacacacacacacacaaatatggcacacaggccttgatgttataaaatgatggttaaactttggagacttgagtcatgttcaagtgtacagtccaggtatgcaatctatgattatgaaaagcacagcccttctttaccaagcatgacaaggtctttgcctagtacaacccatgactgctacaaaaaatatataccatgcatttattttagaaagaagcacattaagaagacgtctttaaatatagaaagtagaaaatcttatttaaatttgggcaaccctttagaccttagaatgtttataaaggagattttttaaaaatgaagtttcagaggaaggaaacattgcaattgacaggtcagggctcagtgtataagactaattaaataaaaagccatatatatatatttttctctcctctcttcttcaccaagcttctctctttcctccttcttttcctttcataaatgagtcttttctgctcctggttgtcagtgcagaagacagcatgttccagaatatgcagctttccttgtttaatacaatgttgatggtttctttcattaaattttagcatccttgtgaaaatctggcaaatactatgatacatgctatctccattaaatgtattaaaataacattcaatcaggaaattagttaagtattctctaaataaattatatttgagatgctgcatataaaatatggtaattgtgggagcaaatcaaattatacataatattttaatgttctgttagatgaagttgaattgagcagaaaaaaaaacaacctttagagccagacagatctcagtttgatttatggctccagattcagggaagttatttaggctttctgaatccattattaaattctcatccattatcattgtttctgaatggggcataattggcatttgaggcaggagaattctttgttgcgtgaggtatttctcagcattgcatggcagttcccacacctatgtccctccttcttctagcaattaaatgctagcagcattcccacctccagtattcccacaaccaaatacctggacaaatttgcaaatgccctgtaggaaggcggtgactctcctagttcacagcaagtgtattaaatggattataataatacctcttcaagttggaaggcttaaatgagaacattttcctggcacttttgagtaaacaaaaaggtagttaagaaaatgtgttgaggtcagtcagacctgggctctgttccagccctgtcaatagtgtctctgtgtagcaaattgcttaatctaaacctgagcatctcatctataaaattacaataggtgtaatacctgactcagaggattatttgaggattcaatgaagtaacatatgccaagctctaagcactgatcctggtgcagtcagctcttagtcaagttggctatagttgctgcctcattattaaggccagactcctgagactggggaaaagcaggtagcaaagaaatatgatgccttgtttgagaagttttacaaaaacaggatataaaaagtagttggagaaagtagtcagctccccccggcaacaagatagtggactgccatgtatgtttgaaggcagagggaaagtagacactggcgaaactgaggctgagatccaagaagatagaaaggtgacaatgtgagatgtaatgaagaagtcaggaggcttgggcacacagggcgacagggcagccctggcattcactgtggcttttccaagtatgaagctgtttttacacatttgtagagttagcccaatttcattgggattttcacctgctccacactttattagtgcctcacactaaaagtgatggccagcaaccaaccgagccgctttaatgttatcaaactcaagagaaaggcatctggaactgagtgttctggctaaaaataaggaagcccaatctagtttgaaatgaagcaatcttctccctaaaaattcttcctggggctagatcttagcctcagagccctgaaatctaatagcaatttaaggaacactttttcattttcttcgagtacattttcaatgatctttttaaccctcagttgtcctttcttttcttctaacttctattagcagcattaaaaaaccttttcttttcggattcattccaatgtcctttcagtctctaatctcaccttcctatgtcaagaggtattttgcaacacaattattttccttcctaaaaactgcagctgttccctctacactctctgtgaggatccagagatcacaggaaaaacatggtctctggcttttggggggtgggactttgtgtcttcttgagcatttggtcagccttttaaaatttttaattaagaaaatacaaaatccatgaaattagaaaaatagtaacattgattacaatggtaatattgcaggctgcatttcaaaaattaaaaaattaaggggaaaaatcaagttttaaaaatgatagtcctattctaaagctgcataggaagcaactgaaaagttaaaaatagcagaaaaatactaactctttaggtaaaggatcctctacaggacattactctttggagatgttctataaatccaggggtttatgattcaggagactcttcttaccctgccttcacttggaggttcacaatgcagatcctgggagtccagaagacaataacttacatgatttattttatatcagtcccttccaaacctatctaaggaacggatgtgctttttatggaatgcctattaaaatctcacagaacaaattaatatgttgaagaaacaggatttacattttgtttttgttttggtggttgttactgtttttcattttcttaaacttctaatgcattgatgacttagatttttgttaaatacaaaaatcatatatttggatgtcatgacaatagcaaattactacagaagtttctaatcacttttcaatatctaatccattgtaaactaattacacatagtttgctgatgggcactggtccatggaccacaccaaggagctattcttttatccatgctgtataccctttaatcttgatgcatattatgaggacggggacaacagagtaaataaaaagcttttccctctaaaaagtagaataatgggtacatgacttattgaaaagcaacattcctttatcttattcatcaaaggcactttatacacaaacaatcttgtaatatttcaaagcagaagtcaggacaaaatataaactacctcactaagttgatgttttaaaagaacacatggtcaacaggaagcccctttcccaaaaatatatgtatttagcaataataaaacaatggtcaaattcttttcattatctctttttaaaaaaccttcatgaaagggttgagaggtagttcagaagggcctgttttccactcttcatttagcagggtgctgatgttcataaaacatgcaaacccaaacagcaaagtcaatgttgttcttatgcaacaaggcctgctgaattcaaatttaattaaatttatttaaacagagataagcttgtaaatgctttatgctgtgcagttttgccacaaaaagtaagaaagcgataatagtgtggcctttttttttcaagcagttgatctgctatattataaatgaaactcaaattcttggattaacccaaaacaagagtaattcaagcaaattatatttttgtatcaatatcattaaataatagatactatctattattagaacaagaactggaaaatggtacagtgtgactaagctaacaataaccattcaaagactgttccatgtgtacatctgccctatggagaaagtgcaaagtgctgatattcaggacttgctcacagaaaaactgacgaaggaacaacaaagcaggtgccttgatggtatgagcaagatgataaggatgatggtgaagttagggatgaaggtgacaatgggatgtcagttatgatggtgatgaccgggatgacagggaaggagagaaagatggtgaagacagagataatgatgatggggatgacagcgatggtggggatgacaatggggaagaggatgatggtgacaacagcaacgctgatgtaaacactgacaattgtgatgatggtgaagacagggatgatggtgaaacaaggatggcaacgatgacaaggatgatagtgatgacagggatgacagaaatttgaagactgtggaagacaataacagtggtatgtgacagataacactgatcatcttctgtgtgcttgacactaggctaaaggcttcacatgcatcatcccccttaatttccatgaccttcctatgaggtgggtgctatcatgatctttgtttcacatctaagaagcttcagaatgatagagggtaagtattttgccaagttcacacagctgtccagagcaggagctgatatggcccaagttctgcctgactctagaggacacactgttcattactaagctatgacaccaactactatgcaatactagctggaggttcacagtatgtgtctgttgaatgcaatcatgcatggaatcttatgaggccatatggcccagtgcctatttcagatagattaacatttatcctggatagatttttatctggtaacttcttaaaagtaaagaattattaaaacttaagattagctgtctcaggacctactgtggattgaagtcaactatcaacaaggactttaaaatccattccaaaatggctctcatgttatctttcaaacatttaaaaaacatttactttctcctacctaaatgcattccttgtcccagtttcttggtgccagttattctaatctcccaagtttcttaggcttgaaaacgcgagcccatctgactccccactttctcttattccttctatccagttagtatctgatatttggtaatatgtcttcaacatttctgtcagattcatcatttcatttttaggcccactcctagcttgccagtattttatcacctcagggccaattgctaattttaaccagatggctgggtttcattatgacacatgatccctcactacctatcatctcaagttcaaatacctcactctgttattaaagatccctttatatgtggccctaccttatcccacatatacctctagtcatcaaagcatgcctgggcaggttggtatacttgaagtctctccactgtccccccagataaaaaataaacccacaagacacagggcttatccatcctcaactgccctttccagcttccgttcactcgaaatatgctctgctcattcccatacaacttataatatactctgtaccattttctggcacacaaacccatcactttaaggatactgaagctacttgttcaaactggttcaaaatgacttttcccttttcctgacttcacatagccttaactaatttacctttttttctttttccttctttctttcatttctttctttctctttctttctttctttctctttctttctttctctctctctctctttctgtctgtctctcaagccatgctgaggagcccaagtacctgggtttgaatcctagttctgtcattaactaggtactatttcttcatctgtaagatgaggatgatagtagctacttcatagggttgttgtgaagactaaatgaacatatagtgatcaacaatcatttgctaaaactattatagaacattaaatatgtttcagtcttgtttcttctttgtatatcctagcatggcatctgaaaacatattaagcatataacaggtattcaacaacctcttgttgcctttaattatatcagagcgaaaagtcaatggctttgctttgaggccaatattcccttacttggatcatgaagcatcgttacatagaattcctataattttaggaagacaaataaaccttggcagctagagtgttgcaaatcattttcatgtttccacctgaagcagtaagtaggacacattttaatagcactgttttcatctgaggaaaattatatacagttttctattctgaaaaatggagctaatttaagtattcaccacataatatgattatgaagttaaataagacaacccatgtaaatggtaagcattagtcctctataaatattagtgtcaattttagaaatatcagtatcatcatcatcatcatcatcattggatttgtctaagcaaagacgaccttgaactagaaataacagctgttgattcttagcctagttttaaaaattatgctgccatctcttagcctttcccattttcagaaaagtaacccaaattccttttatttgcccttttgaaggacctattttccattcatgactttttcatatcagccattcttctctggactttcttttctttttttctttttttttttttttaagttcctactttctaaaaggtatagtagaaaaaaatccagatgcaacatatgaatacaaatttaccaaaagatcataataaaaagattcttccttaaaacttgtatgtcacactctttttaaataaactcttgcattgtattagttctctgcacaagctcacattcatcaagtgtttgcctattagtttgagctctttctgtgaaacttaaacttactcagtcttggtctatcatattcttaaattactgagtttttgcattgtacttggcttgccagaacttcatctaatttgcataggcctattttcctatttaataacatattttaaattttacttctacctttgagacaatcttagaaatgtcacctcatacaggacctttaactctagtaagcatattccacgttcctttacctaggtaatcaattaagtacaagttcttagacatagctttaggctgaatttgagaggttcttcaaagttgaaaacctctgataattaccccttaggggaaatctttagtctaatttattgtttcctgagattcttataagatcataagtcaagtttctccttccctaagatttatgggaaactacagtcaaattcatacttttcttttttttgagacggagtctcactcttgttgcctaggcgggagtgcaatggtgcaaccttggctcactacaacctctgcctcccggcttcaagcgattctcctgcctcagcctcccaagtagctgggattacaggcatgcgtcaccacgcccagctaattttgtattttttagtagagatggagtttctccatgttgatcaggctggtttcgaactcccgacctcaggtgatccaccagccttggcctcccaaagtgctggcattacaggcatgagccactgtgcccggccaaaccaaattcatacttttctaaaattcttatggaactgcattagtactgtttattcctgtgtctttgtgtgtgtgtgtgtgtgtgtgtgtgtgtgtgtatgtgttctattacaaatggaatttatatctgtctggtataatattattttacaaagatatgactagtgacaaccaaatattttatgttttttagttgactgaaattaatcaattcagttccatgatttgttctatttctcttttcgattttgtcagtttttgcttcatgtattttggggctctattgccaggtgtgtttatatttataatttttgtatattcctggtttattgaccctttatcataaaatagccctctatagcatatttcttgtcttaaagtctattttatctggtaacagtatagccactacagctttcttatggttactgtttgcataatatatctttttctatctacttacttttaactagtgtctttgaatctaaattgtatatctgtagacagcattttggttagatcttgctttttaaaatccagtttgtcaacctctgtcttctgactgagatgtttaggccattcacatttaattatcatggctggacttacattttccattttgctatttgttttctaagcctcttgtgtttttttgtttttctatcccttctttactgccttttttgtgttaagtgtatttttagtgtaccattttaattcctatattgattttctaaatttatttggaattattttcttaatggatgctttagcaattacaatatgcatcctgacttatcacaatcaactgcagactaataataaataattgtcgtgaaacatagaaaatctgctcatttgtagctccatcctctccccatttcttgcagtattactgtcatataaattacatatatgtatgtaaacttaacgataatatactcagtaataattataataactgctttatgaaatcctatgtattttaaagaagttactatgtgagaaaaaaatacagagccttttatattattaacctacatatctaccatttccattgcttttcattttttttctgtgaatttgagttatcttttggtgtcacttacttttagcctgaaagacttcctttggtattctcataagacaggtctgttagcaatggattcctgtctttttaaaaatttggtcatgtctttatttcacctccactttttcaaggctagttttaatgaatatagaattcttcgttgatttttttttcttccagtatctttcaaatgagaaatcagtcattaattgcataaattcctctctatgtcatgagctgttttatctcttgctgctttcaagattttctcattttctttggctctcaacagtttgactgttgtgtgtcgagatgtggatggttttgtgttcatactacttagggttaattgggtttcttgtatctgtaatgttggctttcaaatttggcaactctttggccattacttcatcacactttgttttttctctactgctttctctccttataagactcctattacgtctatgttggtacactcaatgttgtcccactgctctgcaaggctctgctcattttccttcagtctttttctctgtgttctccaggttgaataatttctattgatttgtctcaagttaactgattctctctcctatcatctcaaatctgctactgagagactctagtgactttttcatttcaggtcctgtattttcagctccagagtttccatttaattcttttttctttttataacttatatcccctcattgagatttattacttgttgagtcacgttgtcataatttcctataattctttaaatctgaattttagttctttgaacatgcttataatagctgctttgaagtccttgtctacaaaatctaacatttggggatcctcagaggcaatttctatgataattttttccttggttacactttctagtttctttgcatgtctctgaatttttgttaaaaattgaacattttaggtaatatattgtagaaactctggagtacaaccttttccctgaaagtagttgttgttttttattgttgccatttgttttttgtttagtaacctgccagggctaaatctgtgaaatctgtctccctgtggggtgtagccgctgatatccctgctcagttttccttcccttccttccttccctccctcactccttccttcctccctttctccttcttttccttcctccatccctttcttcctttttgtagagacagggtcttgctatatctttttaaaattcttattgtaatttttaaacctggattcctacaggttacccttctgactgtatagtttaatgggcagccaatgattggactaaggttgtgctcctacatcttgagccagtaaagcattcatcctctggaagctttcatatattcaaaatttagcagtttttcaaggataaagtttatcagattatcatatgcctctgtctgattccatagctgttaaatggttatttttgtcagttttttctggctttacaaccccttttgggaaaagcatcttcaagcccatcccttggccacagccagtagtctctgagctcagggtcttgactttgtacctttatattccaggccttagcacacagtagactctcagtaaatgctggcaaaatttctcttttttatttccttttcctaagcccgataaatttcctaaaatccgcttggcaaattttcttgttaactgtgatttttcaattgatggctactaattttgtaataacatttacaaatttcataattgtcatatgatgtatgtcatagaccttgtttacttgaataattttagtctttcttggtactcttaattatttcttctattatagaagttgcgttttttatatttctgtttctcaaagaccaaatgccattttttcttgacaatttctggtttccatttctttgcttgctatattttgttcacacttctttccagagaatcaataacctcataccacatattttgtattaaaaaaacccttcatattttgtactgtggaagtaattttactcaaaattacattacaaaagaaccttacaaattggtagtagtaactgagactcttttgcagattacctaattttgaaaattatttagtgaatataataaagataattaaggatattgtatcacagtatgtattcactttatttattgtacccaagataacatagtgttagttatgtcttactgaagatgctcttgtgaataacgtaatttattataacacacgattctgaaaagtcatatcttggtaacacaatacttcagctataactcatatcaagtctttgacaagatgaaatccgaaaacaaatttttgtaaaaattattaatcttaaggatgaaggatgcataacacaaaaattcatgagggttttagtaatagcttattttaatctcaacagctaccaaaccaactttattagataatttaaccaatttcataattctaaatcttttataatgacaaattcttcaaaaagataggcttccttcttgagaaatgtacttcacatatgttctgagtattcatggattaaacacattaacagatttagaaggcagaatctgatatttaaatgtgcatgtttgtactttcccactattatcaatcctcactcatctatgataatgaggaacacagaatggggacaggaaggataagtgaaatccctaaacacagcattcaatatctttttccataaaagtttttaataacaaggggaaaaagaacttatgagttcagtctcatttcttctccccactcctagctactacagaagattataatgagaagagtaagtgccacaagacagaaaaatggaagaagagaaaaaacaaagtgcctggataatatatagagcagttaatgatttcatgaataatttatttatcaacaccacttttctaaactttccatctatcactttttcattagtaactgaaggtagaggtaaatagcacacccttaaatttattaggtcttctttaaagttggactgccagacagagaaaaaaaatacaagacatttaaagtatggcaaaactttaaaatagtcagttgaggcatttatctccatgtatttatatcttcaattttgcttagcaattttgtttgtttgtttgtttcagtgtatatatctcatatattttgtcagaattatccttaagcatctcatgttatttgatgctttttcataagtcagaaggctcaatattgttaagacgttaattgtatccaaatttatctacactgtcaacacaatcccaatcaaaatcccagcaggtttctttgtagaaattgaaaagctgattctaaaacacatagggatagaaaagaacctagaattgaaaaagcagcttcaagaagaaagaacaaacttggaagaatgtctggtttcaaaatttattattaatatatactagtcaagacagtgtggtattgatgttaagacagacaatcaggtcaatgggatagagtagagagtccggaaatagacctatatatatatgggcaattgatttttgacaaaggcaattcagtggagaaagaagagtctgttcaaaaagttgttctggaacaactggatatccatataaaaatatgaactttgagccatacctgacactatatataagaattcattcaaaatagatcatacacttaatagaaaacctaaaattcataaaacttcttgaagaaaagtttgaaaaaatctttgtaacatcaaatctatgataataaaagaattactccaatattgccataccagatcactcttctttttagttgtgacaggcatattaggcctgaactttatatacaatgaaaaaccaaaaaaaaaaaaaaaaaacgaatatgagccatttgcagttaacaatataaattactgctctaatcacaatattctttttctggtatgagctcattttgcaggttaattataactgtgtgagaataacttgtatctaaaaaatagagacataaagaaagagacattaatttttaaatcagtacgcaccgactgaatggaaatcttgacactgaaaatttctttcaaaagaaaaaagtactaaaaatcaataaaattgtaccagtggtataaagtaacctagtcattaaccaataaaatattaattctgatcaaagaacaaatacttaaattgaacatcttcaaaattaaaaatttttattttttaaaagatattgttaaggagaggaaaagatagccacagactgagagaaaatagttgcaaagcatacatctaatgatgaacttgaatctagactatgtcaaaaacaaccaatggggaaaggactccctattcaataaatgatgctggtataactggctagccatatgcagaaaattgaaactgggccccttccttatatcatatacaaaaattaactcaagatggattaaagacttaaatgtaaaacctaaaacaataaaaacctggaagacaacataggcaatactatcctggaagtaggaacaggcaaagatttcatgacaaagatgccaaaagcaattgcagcaaaagtaaaatttgacaaatgagatctaattaaacttaagagcttctgcacaacaaaagaaactatcaacagagtaaacagcctacagaatgggagaaaatatttgtaaaccatgcatccgacaaaggcctaatatcaagcatctgtaaggaacttaaacaaatttacaagaaaaaaaaaccattaaaaagtgggaaaaggacataaacagatacttttcaaaagaagacatatatgcagctaacaagcatattaaaaaaagctcaacatcactgatcactagagaactgcaaatcaaaaccacaatgagatactgtctcacaccagtcagaatggctactattaaaaagttaaaaaaataacagatgctggtgaggttgcagagaaaagggaacacttatacattgttggtgggagtgtaaattagttcaaccattgtagaagacagtgtggtgattcctcaaagacctaaaaacagaaatatcattcaacccagcaatcccattactgggtatatacctagcagaatataaatcattctaccataaagacacatggacacaaatgtttatggcagcactattcacaatagtaaaacatttaacctaaatgctcatcaatgacagattggatgaagaaaatgtggtacatatacacaatggaatacaatgcagccataaaaaagaaggagatcatgtcttttgcaaaaacatggatgaagccagaggccattatccttagcaaacacaggaacagaaaaccaaatactgcatgttctcatttataagtgggagctaaatgacgcaaattcacggagacaaagcaggaccaacagacactggggcctagttgagagtagaaggtgggaggagcgagacaagcataaaatatacctattgggtactaggcttagtgcctggatgctgaaataacctgtacaataaaccgccatgacacatgcacccctgaacctaaaataaaagtttaataaagtcatctttgaaaaagaaaaaaaaagagctcttaaaattcaaaaataagaagcaactggttaaaaaaatgcataaaagatttgaatagacagtttactgaagaagacatatagatggtaaataagcacatgaaataatgttctacatcatcagttattacagaaatataaattaaaatcataatgagataccactacacactcgttaaaatggctaaaatgcaaaagacttatcagactatgtgttggcagaaaggtggagaaaatggaactctcatatactgccagtaggaaaatgtaaactagtgaaaccacttggaaaataatttgacaatttcttaaaagtttaagcatatatttaacatatgatccagccatttcagtccaaggtatttacctaagagaaaagaaaatacatgttcatacagacttgcccacaaatgatcatagcagtttgtcatagtcgcaaatgggaaataatccaaattttcacgaacagatgaataaataaacacagttgtatatccataaaagggatactaatcagcaataaaaaggaatgaactattgatgcatacaataatgcagatgattcctcaaattattgtgagtaaagaactaagacaagaaaagggcacataatctgtaattccatttatataaaattctagaaaatgcaaacctatctatatagagagaaggcagatccgtggttacctgaggatgcaagggctggagatgggagaaggtatgaattacaaagaatcatgaggaaatttgggggagtagtgatggatatattcacaattttaagtggtttcatgagtgtatacataatataaaacattaaattatatactttcgatatgtgcaggttattgtatatcaaatacacctcaatgaatctgttaaaaaatgatcagaggctgggcatggtggcttacacctgtaatcccagcactttgggaggccaaggcaggcagatcacctgaggttgggagttcgagatcagcctgaccaacatggagaaactccgtctctactaaaaatacaaaattagctggacatggtggtgcatgcctgtaatcccagctacttgggagtctgaggcaggagaattgcttgaacctgggaggccaaggttgtggtgagctgacattgcgccattgcactccagcctaggcaacaagagcagaactccgtctcaaaaaaaaaaaaaaaaaaaaagatcggaaattaccttaaaaacttcaaagaggtaaatgtaaagaacaatatataaattagagaaaatacacataatactaaaatatgagcaagcaaaatgaaaaattaaatgtgaaaaaaaaagttgacggctaatagagcaaaagtgccagaagccaaattttccgtgattacagtcacagcagtgagtgtgctacgttattatgtaaaagcggaaagtgaagtaatttggcttcaattaaaatgtttgaaggaggaatttgggtcatagttgcgaatggcaaagctgccaacatttaaaatgaaatgtatgcatctgaatatttaaaagatcttaaaaaaattctttgtagtcagttcagactgcatggcctcttttaaactgcaatatgcttttcaggacagacaagtgattaaagagaggatcattatctgtaataagacacactgtacaaagtggtcttacctcgaaattcaagcattctgagtcctggtcccaattccattatggttctgaagtcatcttgagagcaaatgatttgttttttctatactttcaatttaaaaaagaaaaaagagaggcctgtgttctatatgtggagaggtcaattaaggtttccaatatttttggtccctggagatagtcactgccaaagtaaagttattaattaaatggcatcttggctttatcatcactgttctcataaagtaaatagtaagtgtcctctcactcccattgcttctgagaggactgcttttgtctgttcagaaaatgaaagagaaaatcaatcctccagtacactggctgattacctatgtatttcaatggcactttatcaccatggtacccaggtactcggaccctagcaataaattgggaacaagaacatcaaaaccacagctctgtgtgatgaggctggtatgaatactagggcaagagccctttgaagttgttccctttgtgtaaacaaagaaaatgccaaaatggatgtggaggctatggttcccaaggtgattcaaattaaaacttaatagcaaggacctcatcaatttgagtcccccattttctcacaagaacagatacctcctgcagagagggccacatcaatgcatcagtcctgtgacagagacgcacatgtcagctaattttaccaaatagccatgtctgttggatctgtaaggctcagttcatcatctgagatttgcagagtgtttcaaccatcagtttgtattctagagctttttctacatcagagcaaggcattcaggctgtaattttttgtgaggcaagacggaaaattcaaaagtctggccttgactgaacccctaactcttttatgaattactgattttctatgttgagcaactagagatgagatattgctagaaggctgtccattgtatggctagagggaccagctgtattggcaaattgactagaataacatgaaaaggctcttaaagctcttttaaaaataaatgttttatatggatttttggctaggtcttacagggaaaaaatatgctgtaaaatgctaatttcaatttgttcacttaatagtaatccaaatgacataatttaagctgattttagagcaagctgtagcaaaacattaccttttagaagctgaatcagtgaaattaatttgcagtgcctcaacgttattttgtaatacgtgatttataagtttataaaatatcaaatagtctgaggttatcttaaaagaggcaaatgtagtgtgcacttactttaactgtagctaaattctctattgcataattttaaactgaaagattttcattaatcttacctctgaactttttaagctctaaacataaaagaatgtgcatatacaaagtgaacgtcagccagaattctgataataaattactaaacgaaatcagataatacagaaagttgtctgttttgatacagtcaagaatcctgtttactgttagcaaatgtaaagcatacattttgcaggagtaacgtcttctagctttcctaaaaataactttatgaactgcaagctacagtaacaacctactttaaaaatatacttattttttaaaatgtgcattcattcattttcatgtgcagccagttccaaacatcaatttcttctcacctaaaacagggattttcaaaatttaaacctttttcttataacatttcctgaagtgactacagctacatgggtaagccacaacacacaaaccacttgagttgtgacatactgaaacctcaaacaggagggaaaaacaactaaaaccctggggcatttcaaaatcctatcaaaaatattttctttgttattggataaaaataaattaacatagactatcaatttatatacaatgaaataacaataaaatgttacaagtctatgtttatcttcatagtattcttataagttgtgtgataagagccacgccatgttaatttttgtatctgtaagaaagcacacagattgaggggcttagaaaatgactcttggtcatggcaaacctgtggatgacaagtctcattatctcccttttttgagggaactgaggcagaggggaacaaccagtctgcttcagaaaacactgctagtgctagtggttcatatttagcacctcacactctaggtttctttccaggatttccagtctcactcttctctgactgattgcaaaacatactgaagagaggaaaaggtactggatttagaagacccagtaagatgcacacattatttcgggataagagtagcctacctgcacctgcttctcatctgtgcctgttaggagagtggacctggttcattgcccgtagtggacaggcttatggtataggtgcatacaagggagcttctaaatgccttgcttttcaggaagttataaacctataaaaactaggcctaaaaatatctagggctgatggcagggatatatgtttctgagtgccacaaaaactccttcagaatgcagaagtgaggcagaagtttccattgtctcttgaatatgtaaaagcttaaaacaaatgaacaaactattcccagagaaaacctatttagtactatggcctatatttcaaaactgtattaaatgtataattaatttcttattagcttactatattatttgttaagatttcctcattatgaacaaacaatgctaagaagactatccacacacccaagtatctgcagaatatgtggaagaagaagtgattacttgctataattatcactgataaaagatcttgaagagctagtgatgatatgaaatggaggtaataaaggaccattaagatgaagtgtaaagattccaacccaattctcacccaaagtgagagtattagttctcataatatgttaaagggtattagggagaaaaagagttttgtttttttttttttttttaggggtaaaataaaatcagtagcctaaaataaaaggttagaaaggtaaaaagaaaaatcaaaactagatttgagaaaagatggaataaacaaagttaataatctgctttacagcagagtcattcatatagtaacacgtgttacatattttgagggaaaaatagactgtgtgagaacctcccaaactgattttcccagcaacctgacccctgctgccattgcttccccactctttagagcatttcctaggatatactctgggaaaagatgttccactgtgttttagaaagtaatttttggggtagcatttagtcctcttaagaaacatcagaaaaagtccaataagtggtattggaggcagctctggaaaatggcatgcaagctgctaacgtatttatagaaataaaatgtaaattatccacctgctttttaattttttttctttttctttttttttttttttgagacagagtcttgctctgccatccaggctggagtgcagtggcgtgatctaggctcactgcaacctctgcctcccaggctcaagcgattctcctgcctcagcctcccgagtagctaggattaaaggtgtgcaccaccatgcctggctaatttttgtattttctgtagagacggagattctctctgttggccaggctggtctcaaactcctgacctcaagtaatccacccaccttggccttctagagtgctaggattacaggtgtgagccactgcgcctggcccttttaaactttttaacatacttttttctccccagttttgtgtgtgtgcagctacccaattctttttcaatctcatcatccccaaatatttactaaaggacaatttatgaaaggttcctgaaagtagggaagcagaatgaccaaacttagagacatgatatgttttcttctctcccaatgtttacatcagttcactttctacccaggataaagttctgaacatgaaatttttaatatttgaaaatgacaaaatgtatgaaattatttaagtatatctataactcaaaacatttgtggatgttacctacaccaactgacattttatactactaatctttttcggttatttgagaaattaaatcagtataatggactcctatttcttattatcctaccagtacatgttatttctgctctggcatgtgttctacttgtaaaccagctttaaatgaaccattatgaaaatctggtgcatatttaaaatggataataaatgaatatttaataggagttacatctattataatttttttccatcaatgatggaaaatttttctgataatctagcaaagtagataataattgtagtaaatggatatttaatagaggcttaagcagattataatcttgtttttccccatctcatacagatcatcttctgatgttaacagaaatcatatataagaacagagggaagcatgtaagttgtgcatcagctattggttaatgaatagctacaatatgacatcaattattgtgatttaaaaaaaaacactcagcaaattgccctctcctagataattttctaatttgaaagtttctcatttttttcctgacaatttactttttaaaaaatgagtgatctatttgttcttgtcattttataaatcagctcaagattgctgtattacattgttgcagggatagatctatgaacttaggggcttttttaaattgtaggagaatacagtttcccttccatttctctctctccttctccctctctttgctttttcactgtaaggtcaacagcttaagaggcacaaatctcaactactgtgattgtttccttttatatgatgggggatgtaaagtcattcagagctgcatctgtcagtggtgctttctaccactgctgacgactgggttataaaaacattcctgaacaattgtgaacattggcagaccataaacaaaatggagaacactggaagacattcaaacgatgatgtcttaaatcctggctctaaaattaaactaaaagaaaactgattatcctttgtcatgatatgcatgccaagagccatgcatgatatgcacagtagacacacacacaaaaataaggtaataaaaataagaaacatatggattctgttaaaacacatgcattcacaatgacagatattgaaaagaacaaggaaagcaagagttgaggatattcagattttgaacagcactgtaattagcttcagaggagagaaagttccacaataggaagttacacggaaaaatgttacatactgtttgtaaaatggtgaaaatatgaaaaagcttagtggctttcacttccttaataatcagcatataaatggagtatttgttcacctatcctttcagtaagacattttcttcagtcatgccatgaacaagtctctcttctgggccagtggggaacaaaagaataagtaaagagcttaaatgtgagtgaataaaattaataaaagattctgtaatgtaatggaaccatatttattattttcttttcatttcattaaagtatttacttgaacctctacttacttttagaaaatattcattgcattgtttctaaggtgactcaagattattcagaaattatgtgttaagtttttctgaatatgaatggtacatattcaaaaaccagcctggtggaggaactattttcaaggagtaatattaccagtgtgaaggagatatatcagaagaggattagagttgggcctagagaccttggccaacttgtggtaccaatgttcaccaattgtgtgatttggaagcaactctgataggtgcctgccaaatttagtggtgaaccctttctctagaccagacttaagttttggttcttttaaattaaacagttcagcagaaatttcaggacatcaagaaaacagccaagggttactctgaggtccctatattctttactcaggagaataagtaacaacattcaactactgccacttccttcctatgtctgaaaaagtccaggcatccttccccaaatttttacaggtttgacacttagattcgcctctaattcagcaactactttgaaggggaaagatgtcctatatattttttataacctctcctacaacagatataattcctagtgatgacagcaaatcctatttccattacctaattttagatatgttaaacatcccactctttttttaagaagcaatgttaaataataaactggtacaacttctggacaaagatttttgtacagggactttccaagcattgcatgttttacttgttgcaaaaatatgaaagttatctttctaagaaaggtacacacagatgttgatatgacttgagaaaaatagtcaatagagtcaatttgttatctccatctttagctgcaagagggaggggggatcattagataaaccaagtatgacaaggaggctttgggtctataactcttatggcaaatggttatattatgttagacaagtagattaaactttgcaagcttcagatattatctttgtaaaaaagtgtatataatacatctgctctcattaccgcacaaggattatgtcaaagtaatctccatttaagtgagtggaacatactgaaaagaaatcaaaaagggctaccagtgggggatgagagaggaggaaaatttgcagagaaggagagaatatagaaatggaaatgagagagagcagtgtattgagaggagggcagcataagaatgagtaaagaagagtggggcagggatgggatgagaaatggaagggatatggaaaactggtttgggtttagctagggcaaagcccaagtgacaaggaatccgtggttaaaggcagtatgactggaaatgagcgaatttaggaatatgcatctcagcatttttttcttttggttcaggattttggtgagtgtcaggtgtcggcttcaagtgggaattttgaaagaaaaaaagacagaacatatttgaaaaactggggcaggatagaggaaggcagctttaaaaagtcgtggttggggatgcagaagacaaaaagggaaataagacaaacatttttaacttgtctgttttgctttccatatgggttgcagaaggcaaaggggacagaaggaagaggggagagaacatttatgcagcttctggaaggggagaagtaccccagaaaaacacttgtaagggaaaacaatttgaaattatctatgaaaggtagagagcaattacccaacagacagagtggttatagacaagactgtatgaatccaagccagtaattaaaaccccaggaattaaggaattgataagatcttcaagttgtaaaactgggttccctcaggggattatattatgagaaaagaaccgaaaatttccaagagaactatttagaatttcattaacctggcaaatgctaaacccagtgcacgcttcaggaatgccatagcagaaggaagaagcagtggcctgacgctttacttcttcagacactgaaatgcagaaaaactagcctggttaacttctggactggagaatatgaacttgaaccagaattggagaaagggaggcaggatgctcttcagaatttgatgaaactataagctctctctcaagggaaatgcacaaaaatctgcacacaatttctaagacttcagaatctatctgtggccatgttccccaccccatccccacatgcaacagacaacacacagcattccttctaaagaacacttgatttcatagaggagaagggttaaagctgggataggcaaatacatgctctatggctcaagaaatgatattaatagatagagtttaagagcatcttcctatgatatgcagccagagaaggtttcaagtttgagaactataatctacttagtctttcttatgagggatactatgtggaactcttgtggcaatataaacatagctatggagatggtcaaagagtagggcattctaaaagggaggaaaggataggcacactaaagtttgagaacctctaattgaatatattgttaccctgggaaacatattaaaatgaaaatgaaagaaaagagaaaaatgaacacattatgtaatgagtcccaggaagaatgaacctgattgctagtagcatcagaggtagggtcagacatggagtctgaggtaaatggaaaatgaattaattaatttttaaaaatgagttcaaagttgttttggaagacaaacggaaattgttgaaaatattatagaaatacaacttaacagtaatacagataatgaacacaagtcagttttctggaagcagaggggtagacagaaacagtgcagaatttgcttattctaatttttataattctaagtttaacattaagacaaaagaagatggcaaccactagaaagtaggcttcagattacagtagccctcactgaaagatttataatgccttgattttggttagtaggttgatccaaatacataaataaataaatataaataaataagatagcttgatgaaggtgatttgcaaaagctaaaaggggagagatacaaaaagggaggataagtaaagcaaataacagagttggaaaataaatgccatgatttaaaacaacaacaacaaaaatgggaaagtcttttaacaacagagttgtcaaaggcctaaacttaagaaatagaaatggatggattggaggatgtggtcattacaaagaaaagatttttgtttaaaaccaggaacaagcaggagaaaaactaggacaaagcagaaatgtcatgtgaaatatcttacataacaagctgatggcttaagccaataaaagttctgggagaaaagaagcacctgtccaaagggaaggtgtgaggaggaagagacacaacaacacctggtctctgaatataccataaaaaagtttgtgccaactagctataattttggggaaaaaaaaactttgagtaaagtagatttataaaaatagtgttcaagaggttattgaagagaaaaaaaaaaacccaaaaagtcctagtcaagagcataaaatttatctggatatgattcaggcaagaatcaatggatgccaaaaaccagtaggtgaaagtttgatgagaaacaggatatttacatagtttcaaaatatctcccaacaaattacttattcattacaaagggaaaaatagtagcctaagaatgaagaaatctgacaaaccacctagaccaagtgatcatcaccagttaacatcgccaagttaacatcaccagtgatgatatatatcaatattatgtgtctccttaacataaagtactgagaaggacacaatttaacatctggctcaaaaatgcaaagcctgaatctaattctgaggaaacatcagacaaactcaaatgaagggcaactttggattaaaactttctggtattcttcaacttttcaaatataccagggtcatgaaagaaaaagaaagaccaaggaatagttctagattaaagaaaatcagagaaacaactaaacataatatgtgctcctgaagcagaaaaagtttttttttctgttgttataaagggcattactgagacaactggtgaaatttgaataaggtctgcatactagataataatattgtaattatgttactgattttgataattgtcaaaatgtaattattgtcaatatgtaattatgttactaattttgacaattgtcctatgcatggttatttatgaaaatgcccttgttttaagaaggcacacaatggagtatatacagataggaggtgtcacttctacaaattactcttgaacagttcaaaaagaaagactaatgtgtgtatatacgtagagagattgataaaacaaatgtggtaaagtgttaacctttggggaatctgggtgaaagatgtataggaattctttgtaaatctttttcgaagtctaaaattattccaaaattataaactaaaaattatctggaaagaacaaactaaaacaactcatgaactttgattagatcttggttcagggaataaaaccactatgaaagacattttgagagaagtgggaaaatctgattatagataaaatatgagatgaaattatggaattattataatttttctcaactttgacaatggtagtgtgcttatgcaggggaatgtccttagtcttagaagatcagtgccgaagtgattaaaagtgttatgcacatggaggagtccattgttgctcacaaagcatggcagtagcagctagacacttcaccactctactgctctgcccaacacagtattctctaccttccttacttaggtaggcatggccatttctctgctagtgattgtcttgatctctcagggtgcaaagcttcccatttgtttaacactgttagaaggctttaaagcagaatttctcagttccagtgagtctcaaaatttagtgaaaatggcttctgagcatttctttatagttcttcctcccccagctccctccaaacaacctgccccagattcaggcctgtgttcgtaacagataatatgttagaagttcttacgaaaaattttgttattgtgagtgctttatcagatctggctttttattttattttattttttgcaggggtggggtgaggcacaggatgcattctccccctctcacctcccctgtcttgggatgtttctcagctgttcttttaatagacttctttggaccatccccacagtaaccagatcgaagtgaaccccagaagtgaatgctgcctgagctatttctcaagaagcttttcagtgcttctccctagcctaccacctgggcaatcaacttctgccagccctgacccagcacatctgtcttcatacgcttgtgccccagcagtgggccccacttatcatccagctgaaattctaagaagtacatataagaaataggcagacaagcaagaagggtatacttgcagtctaaagacaagtgtcaaacagataaaagagggtaagcaatactttttgcatatacttataagctatgcaggtttttaaaaattcttctactggcaggtgaggcttggagaaagaattctaagaatgtatgattgtaagtagcctttacagtcaacctgtaaagatttaatgagagcaaagctctgcctctagttagtacacaattttaacggtgtttactaagcaggcatttatgtcaatgcaccaaacggaagttctgaataacgagacacaaaatttgagggcttattctcaaataatttagttataagttagttcctggtgtagtctgaacagaaggtcactgattcattatttcactgacaaatcatctcctacactaattccacaggaggtattcaggagagccatatgactcatttagaacactgagattaagacaaaagatacaatttgttccagctaaatgaacttatctgcatttgaagcatctgtattttccaaactagaagtaaactttcctcttcagtgattttggactaaattggagtcagttctggactcttgtttaggaacacgtgatggggttgtgaacgtttctctaattgcctggattttttagttgcatttcaacttttacatgcttgttttatttcactcaagacaaaagcaattttttaaaactgcagatacaaactaaggcaagcaaatcatgctatttaatgttgacaactctctgaaaatagaaatatattgggttgatgcaaaagtaattgcgctttttcccattttaatggcaaaactaataacctaataactttcgatcattagtgtttaatccaaagactcattttaaataatcatcctctccaaaaagtttggcttggttgttttatttctcctctgatcttacccctttaagagattactcacaagtaatgtagtagtgggagatatgcaataattgtgtaacttgggctagcaattgcataaattggatttgctttcccttatcctaaataaacagccatctatgtaatgagattattgttttaatttagggggaaatatataatgtgtgtatatctatatatttatgtatatatatgtgtgtgtgtatatatatctctgtgtgtgtgtgtgtgtgtatatatgtacactaaacaccatacctaattcataagtgcttaatataagtcagccattattattattttgaaactactgaactagaagcttcctcttgcttgattattattagaaaaggttaatctcaacaatactaatttaactccataccaaaaggaaactgatttgatcacctggggatatatacatgatcaataattatgaattagctgtaaaagtcattacctttaataatttagtcattatctgtgtccctgtcatcaaaatggtgatactacctatatctcataatttggttgtaaagaaaatatttcacattagacattcaattaactgttagttctctccccaaacactatgccttccacagcaatgcaaagagtagtatacaatcttattcacaaaatcgattttacttgaacaatgaggtggccaaatggtaacacctgaattctcaatagtgtggattcttaaacactctctcagtattcctgaacagattggaaaaattaagataatgactgcccattgcacccctgagttcctctaaggtctacggatacatttaagtgagttgatcttctgaaccgcaatgcgttagttcttaaaatatcttcgtcatttgcacattttgtattcaaagcgtgtggattcctctttaattcataacctaaaaccctggtactcatcagacatcatctataaaatgaacaattttcagcacttgccaagactagcttgaaacatttgattctttaaaaaagcaaacaattatatatttctctatatttccaaagctctctcttattttgctcatccagacaagaaatttgttccatatgatcttcactccctgttgagacctggtataataatatggaaacagcccgattctgtttactcctattataacacttattgcatatctgtctcctctgttagtttacaagtttctggaggaaatggagcataatataggaacatcacattcatctttgtatccattgttctgccttacttgtaagggtgtccttgctataaatccatacaagatatatcaaattagggtccatctatcactgaaatcagaaacacccaggggtacttgtttaaaatgcagatttctttattctatccaaatattctaaattataatggctacgctatggcttgaatatggtttgtctctaccaaaactcatgttgaaatttgatccccaatgtggcagtgtaaggaggaggccctttagcagaggtggggtagggttgaatgagttctcctgggaggtgggcgggggggcggggtggggaggtgaggagggggaatagattacttcctgaagagcagagagtaggttgttaaaaagagcatggcttcccaggtttatctctcttgctttctctctaatgcatcctcagtctctacatgatccccttgcacagggctgctcctctttcgctttccaccttgagtggaagtagcatgaggccctcaccagatgtagctgcccagtcttggacttttcagccagcagaatcataagccaaataaacctcttttctttatacattacccaccctcaggtattttgttatagcaatacaaaacagactaagacaggctggtattgggcactgggacattttatcatgctctacaggtgattctgtgtataataaagttttggaatcctatcacagaagaagggctacacattaggaacctgaggttcttcctgatgacccagaaaacctgatagttctcagaagaataacaaatctgttttttcccaatgatcaaaagcgcatattctctgatcacaataaatctttaaaaacaaaaaatgaaaatatagggagagagaagtttttttttctttttatcttttgcatacaggaaaactttaaacaaatacataaaagtagattaaataccactgtgattccccaggtactggcccatcacccagcttcaccaatcaatccgtagccaatcattttttatctatcactacccatgtcccaaccccaaacaagctttctttaaaaatcattgtcctggtcaggtgtggtggctcacacctgtaatcccagcactctgggaggccaaggtgggaggattacttgaggtcaggagtttgaaaccagtctggcaaacacagtgaaaccctgtatctactaaaaatacaaaaactagctgggcatggtggcacatgcctgtaatcccagctacttgggaggctgaggcatgagaatcacttgaacatgggaggtagagattgcagtgagctgagattgcaccactgcactccagcctgggcaatgaagtgaaactgtttcaaaaatagaaaacagaaataaaaataaaaataaatcattgtcctcaaagctttaaacaaaagctaagacactgaaaaacagaaagatgtaagacaaactactcaaatttttttaatattgaatataattatacaaacagatttataacctggaaccatcattagaactacaaagttgcaattcaatggatgtgtagttatactctagagcaagtacaagatggttgttaggactccaatgagataatatttgtaacagcatctagcacaggtgctatcatacatagaacaaatgttgtgagcttgaggactgtgaataagacaatgtggtagttttcaagatatgttcacatctttttgacacttctcttttcaacaggtagagattattccctccccttcccttgagtatgggctggacgtggtgactcacttctagtttataaaatatagcagacaggattggatgtcactgttaatattaggttataaaatgactatggtttttgccttagatgtggggataggtggatgaatatgctttctctctcatcatattctacaggaagatagctaccatgtcagaaagcagccctggagagagggaagccaactgccatgtcttgaggattctcaggtagcctatggagaagtctaaacagcaagaaacaaaagcctgccagcaaccacgtgagtgagctaggaagtagattttccagtcccagctaaaccttatgaaaactggcccatagcttcatttcaaactcatgagagatcctgaatcaagacagctaagctacttagattacttataacagcaaaactttgggaacaacctaaatatccatccctaggagactggttaaattgcctacagtgcatgcacaatgggttatatgtacctgtgagaaaaaagaaggaagatctttatgagttgatactagggtgattcccaggatataatattaggtttcttttttttaaaaaaaggtgccaaagaatgtataatgaataatacgcctcttttgtataataaataggggtaaatgtttatatttttatttacttttatcaaaaataagcacaggaaaataaacctgaaactagtaaatacaaatagaatggaaacttttccatttttatgtagttttaactttgactatggaaataatttacatattcaaaaattaaattaaaatagttggaaaaagtaaaccctaaaagggaataacaaagaaacaattgtaatacactctatatcaagttgataatacaaacaaaaatgataattaaaggaactcttgcattcagcactcagactgtatacactctactaaattcgaagaacaataattgtaagaaaatctaattttctcagtagttttgttattgttggttgaagtattattgctgtaattctgaatctattttgtatgtattggagcaaattagagagagagagacagagtgtgtgtgtgtgtgtgtgtgtgtgtgtgtgtgtgtagatatttttatttttttaagtatcaaggttctcactgtagataaatggggatgccaataggatctggggggagatgatgaagaaacccgtggtgctgcatttgaactggagtttgtcagcatgatctcatcacttcttaaaaaattaaatctatggtctgtcttagcagcaatgacattccaaatagcaacaagaaccccaaaaacccagatattggcttctaaataacattccctattaaaagaaaccaaccaaaagaaatggttgattccagatctagggcagaaaaagaacaaggtaagatttgaataccttttgccagaaagccaggaagtgcttaacaatagctatggcatcatctgaaaaggacacaggagaggttctcaattaaaaaaaaaaagaatctggaagcttcaaaaagaataacaatgtattaaatcataacactgggaggtaaaaagagggaaaggaggaaaggtagaggaagagagagaaagagaagtagcagagacactctgtttgtgagtgtgagtgagacagagaaaaactgtgtgcatgtgtgttggagaaagggaggacgggaaggagagacagaaagagagagaggaggaggcaagaaagtaggggagagagaaaaggaaggattcaaggaagagagaggagagggtgggagagaagaaggaataataaaaaaaagttttttaaagaataatgacaattaattcaggcaaggatcatcactggatgttaaaacctggttgttaaggaacagaaatttatatcacctttcccttaaagattatttattaatttcagagaataaatcccacagataactcattaattacaaaggagaaaaaatgaatctttacaacggagagatctagcagtcactatgtcacccaaatgatcaaacttgtcactaacagtaaaaccagatgccaccatgtgtccttgatgtaatgcaataaggaatgcacatgttatcagtgtgaaaaatgtgaaacccagtggttctcaaagtgtagtcctgagacagcagcatgggtattaacttacagacttacttgttaaacttgtgaacttgttagaaattcaaatgactgggctccaacacagaccccaggaactctgggggtggggccaagccatctatgtttaacaatccctctagatggctctgaaataccctaaagtttgagaaccactggtttaacctgaatttaataaggaaacagtgagacaaatccagactttcatatatattctactgacctgaactcttcaaaaaagtcaagttcacaaagaacaaaaaaagcagagccaggaagaaatggtggaaggaaactttagattaaactaaaaagacataacaacctaatacaatgagtagattttaattggatcctgaattaaaaagaaaattaaaactaagagaattttcaaggcaactgagaaaactgaaatacggactttatattagatcacagtgtgcatttatcattacctatcttagatgtaataatgtattttgattataaaacagaatatccttacttttaagtgatgcatgctgaagtactaaggaataaaatgtcttaatatctacaacttagcaactttctttcaaatgattcaggaaaaataaaacaaatgagcaaaaattaaaaaataaataagaatttaaaaataaataaaatttatacatttatatctatatataagaagagaaaataagtcagaaacaatggtaacaattgatacattaaggcaaaagatgtcttttttccaactgtttttcaacttttctgtatttgaaacattttcataataaaaagatggataaaatttcatgcaacacatgcctagaaattggaaaagggtgagtattctaaaaaaccaaaaagtcagaaaacaaagtaagtctgtaagtttatgttttcaaagtgaaagactaaagcattctgaagcaactaaaatgctccaccactgaagtggcagagtggaggtaacggggttggtcacttactgagctctgacagaatttccagctcatagcttatagccacccacatgtgaactatattaaaaagtgatgcacttccagttttcccttcactacagaggaaatgcagagagtcaataacatcatcaaccataagcttttaaggttcaacatcctaataaaactgatgaatcttgacttgcagcctcagcagttaaattactgctatgaaaatcacggccaatggccaagttgcatgaaagaataatgatacatatttactgttaaccatcagtcaagtccaagagctatgagagatgaaatataaaatgtaataaatgtgaatgtcatctgagggcacctgtcccaaagacacacacacgcacacacacacacaatgaatataataattttctttgaatatttttcctggtaattaaaaaaagctattgaaaaatacaaaacagtaaatcctaaatgatactcctaaaagaaggagtccaatcagctgtaaacaaatcaataagaaagtgctatgataaggtaatgctaataaagtattaaacctttcctttcacaatcatttgttcttgagcaactgtactaaccatagcaagacactctccccatatttaaagcccatgatttatggctcactttcttccacagcttttatgagaaggcgttttttagatgtcccatgtgagctgctaacatctgcactgatgaaagaattgtaaagggcaaaattcacaaaggattaccactatcaggttttttaaaagagatacaatacattataatttgatgtactgatagtttttgaagtactttccaatgtaaacttcaaaagatcataatgaatatttaatttcaatcacagcacacattgagagttcaaaattactggccactaggaaactaaatctactgataaaagaatgcaaccacttattacagccacaagcatgattttgagctatgattacatgtaaatctaatgtctctacaattgataacagtgggattaactggatatttctgccaccttaaaatagggtaaacagtcaatagtgagaggagttaattagttaatagttagcagttgcagctgcaaaatgaatcaccattctttgaaagtctgaattttaatcttgagtggtctctgtattttaagtaagcactatgttgaaagcttttattagtaagtctcttatcctgtcttcagttgccaactgtgtatgtgctggacttgggaaaaataatgaattctgattgacgaacagcttgaaatgagggtttgtgagtgaggtaaaaggtcagagattctgaagaggaaccatagcttcgtggttatgattgttttctatgcaaatagacagatctgtgtttgaataactccatcacttacaagctgtgtaacctaaggaaaattacatgatttttccatgcctttatttcctcatctgtaagacggggacattaatagttttctaccatgtggatatgttgtgatgacccaatgagataatgtatgataaggtctttgctacagtgtctggcacatagtgaatactcagtacatgtggctaggattattagtgcatgttgttatttggcatcagtgtttggtataattctaatgacctttattagtgttttcctatcagttgcctgtgagttgttagtaatgatggtggcagtggctgtagcagcccacaatgagaatatttcacattactggtgccaatgtttctttaaattttggcattgtttagtgaagagttaaaagactacagccttgtcttttggtggaggcccatttaccataattcccctctactgctttcccaatattctactccagttaggaatgtccctttgagacactgtttatacagaggaaaactacgcaaaaatttaaggaaaaaaaaagaaacattagcaccaataatgtcaaatattctcatcgttagcttaatgcctaaatacaactgccagtttcctgatttactatcactctccacccattctcaaaggcactgcacatttttccctgcatcctggaatacaatcattttagaatgactactttttctttggcaagacattcacttttggtgggggtgggggggctggttcataaaccccttctaagattgcctatgtaggtctcttccttcattcctgaatggaattcctctgtggctcttatttggctcacagtaaagtgatgttgaacaaaatgtagaactttcaagttcaatgttatgacgctaataaaaacctagatggactcatcactttttaaaaaactgtatgattatgattttgtgatgggctggtctttgacactggcaaacaaagacaggcaactgttgcacattatcctaaatgagggacagaattgcacttgtctgtgaactccatctgaaaatggactgcatgtatcttgttccccattgcattcacaatacgtagcatagtggcagatctgggtaggtttagaaaaagtattgatgaatgatagaattagtggaagaaaggaaataagagagagagagaaaaaaaaggagagaagaggagaggagaggggaggagaggaggagggggaggggacaggagggcgggggagaagggcagttctaatctcagttctgaagaaagattaaaatatataaagcatttgattgcctttttaaaaatgccacaaaatggttaagttgaatctttaagaacattagcttaaaaaatgaaagattaggagacaactcaaaaataagtgcaaaaagttattttataggccaggtgttctctaccaagcacataataaaaaggtgggtggggggaaggggagaaggaaggcttaaatagtaacacctataaagaaagattaaggaaagatttcctcacagctatgattattaaataccaaaataagataccaattggtcatataacctttcttcctcaaatatccttaaaagcaataagagtgatactcatctgcctggaacaatataggactgtttctgccaagatgacttatcaagccccattccacctctgataaatttttcatagtctcctttgtggctatgtccaaatgaccattgtaagtaatcccctaggatattaacatttggagtacatatgcctactgaggcttttaatataaatgaacatttagaaaataatttaggattagaagtctcaaccatttcacacttcatggaagtgtgtcaaatttatgttaggcttttagatgaaggaccatattttccccaatagaatagcacggtgtatatataaattgaatgcacacttgggataatatgcagctgtactgtgtaacagaagagaggactccacattttaaaacatttaaagaaaaaaaaaatgaggcagataattctatccatcctgatataaactggcaagaaaatagacaaaaactgaaacatataatttgtttaaattattcaaattagcaagagattttttaatagtgtcccttaaaaactccactgactcacatcacaagcagcttcagaacaaagtttttgctaaatttctcatatctctaaaatgctccactcagtagcaatcaatttatgtaagtatctctattataaataggatatatgtatatcaccagaggtaaaaataagtaacagataagtaatagttaatattttattaagggtttacactttgggaggccgaggcgggcggatcacaagttcaggagtttgagaacagcctggccaacatggtaaaatcccgtctctaataaaaatataaaaaattagccgggcatggtggtgcgcgcctgtaatacacccagctactcaggaggctgaagcaggagaatcgcttgaacccagaaggcagaggttacagtgagccaagatcgcgccactgcacaccagcctgagcaacagagcaagattctgtttcgagaaaaaaaaaaaagtttacataataaacctttatgttctttattttataatataaaatactaatatattaattagtattacctttttttaaagccttacctgctttaaaaaaattcatccacgtaagaagacaatatgaggcccaggcaattattatgcccattttacaaatgaaaaaaaaaaaaaccaaaaacctgaggttttgaattgaaacaatgggagacataagaatatggattaagacgagggagaaatctattctaaaatttgaattcaatgggacattatctccttccctcactatcaggccaaccgttgttaggttccaagccttctacagctgcactgagaaactcagtccttcatttctcaggagaatcacctctctatgatgtacaggccacaggcgatgacagcagctctctcactccctaggtaaccaaaatgtgagatgtcaaagagaagagcccatgataatggcatgacttttggcctgagcaactggagtcagaaagacttgccattttctcaaacagtgaagattgttgaaagaatgtaaaggaaagaaccagaagtttatcttgtataagttcagtatggtgcacttacttgacaagcaggtggaattcctgagcagactggagttcaggggagatacccaagctgaagatgtgtgtttgggacttaatgtcctgaaactggatgagaaggtatagatggggaagggtaaagaaaattggattgagtcctgggttatgccaacatttataggcctgagaagatgagcgggaatgaggaaaacaagagaagttaagaaggatgcaagagggagtgctgtcccagaagccaagtgaagacagtatttaaagaaggcaggagtgatcgtgatctacactcaaatgctccaggcaggtcaagtacaatgatggctgaggattaatagttggatttaacaacctggaagtcactcatgttcttaacaaagtgatagtcatgctgtagatacaattttgttttctattttttattggccattaataactctttgaaatcctattttcgatgcctgcataatatcccataatataaatgcacaataatttatttaaacaaactgctattgtggatatttaagttgtttccaattttttacttttataaataacaatgtaaaatcatccttgaatgtaaatcagtaacactatatttaaatgaattcaaatgagtcagcatgcattaaaatgcaagggaaattttgctagtaaataacatacatgtacactaaatactgcaacaaagaagttgagaaaattctgatacatagatatccctcaatagtgccagctatttgtattactttctttttaaaaggaagatgcgatttagagaaaaaaatgggaagcagtctgtttgcacccttttatgtcagaaataagtcctctttggacacaattctttctaaagtaaattatctctgtgtagttctatttggtaggtttctaatacagaaaagtaggatcttcttcataggtctataaaaaatgtaatttataatgaaaagcactttgcagttcataaaatatttcttattcattacttcacagatactcaccaaacaacataggtaatacaggctccccattaagccagttgcccaaacttgtcgtttttttatgcctgcctatccttcaccatacaggatcaaaaagtaatttttaaaagctttatttaacatcacctatggctcctaagtatctgtaagacagagtacacatttcataatgtagtgtctaagtttcctttacagtctggcctgtagttttcatctacattctctcccattactctccacaatgcatcttacactccaactactctacactgctcacaggtgcccaacgagcactttactctcccacctttgtgccttttgcttaggctgacttctctgtctggaatgccacactcctctcattactggcagtgcaaagttacacctacgtttcaactatgcctttctcctttattagttgtatggtgctggataaattattaagcttctcagaacctctctttttctcaagtgcaaatggtaataataataatacctacctcacaggctgacagtgagaattacataaagtaagacatcggaagtatctggcccaataagtattatgtttttaaactctacctctgaatggacagtgaatgcacatgattcaaaattcaaaaatgtagaaaaaaatatacctcccctccactccttcctccacaagaagttctcctaccagaggctatattttttcccaattttttgcacagcctttcagagccattatatacaaatggtggtcttatacatagtctttgacatctttcttatttcacttcataatatatcttgcagacccttccctatctggacacaaacatctgtctcattcttttttaaaacagctgtcatgttccataatatggatgcactatcactaagtaaaccatgtccctgtggtcagactttaagattattagcaaactttttccccaacattttattataaaagttttcaaatgtacacaaaagttgaaataattttatattaaacactcagacacaaaccagatagtttctataaataatattttagtattacttgccttaccatatacctaatcatcccttcatcactctatgaatccattgtaattttttattaatttctgaataagttgcagatatcactacacctcccctgaaatacttaatgaatattattaactattagatgttaaacttttgtcattacaattagtactgtaatgaaaacttgcataaacaccttttcacacatgtatgcatatttcctagaaattaaattgctgggattgtgcatttataattttcagagatattgccaaattttgcaccgtcgagattgtaacagttaacactcccaccagcaatgtaggtgagtgcctgtttttctttgcctttataacatactatcatcaaatgtttaaatacatgacaataccaaagatgaaaagggatcttgtagtagtgttgttctacatttattttagtgaagttcaacattttttttcatgtttaataactacttgcattttcttttgggtacaacgttctatcgataataccttctatttatttgtcttattatggtaagaacatttaacatgagagctactatcttatattagtctgttttcacactgcaataaacaactgcccgagactgggtaatttataaaaaaaaaaaaaaaggtttaattgactcatagtttcacatggctggggaggcctcaggaaacttacaatcatggcagaaggagaagcaagtatgtcttacatggcaacagctgagagagagaaagagaagggcaaagagccgcttataaaaccttccgatcccatgagaactcactcactatcacaagaacagcatgggggaaaccacccccatgatccaatcacctcctaccaggtccctccctcgacacatggggattatggggattacaatttgaaatgagatttgggtggggacacacagccaaacaatatcacctcttaaaaaacatttaaatgtacaatacaatattgttaactagaggcacaatgctgtacagccaatctctagaacttattcattttgcataatggaaattttatacacactgaacagtaaccactatttcttcctgtccccaacccttggaaatcacaattctactctctgttttcttgcgtttgactcttttagatacctcatataagtggaatcatgtagtatatgtccttttatggcatgcttatttcacttagtataatgtccttcaggttcatccatgttgcagcacatggtaagatttccttcttttttaacaccaaataatattaagttgcctgtatagaccacattttcttccatatcttggctattgtgaaaaacactgcaataaacatggaaatgctgatatctctctaagagcctgatttcagggtgttttgggatatatactcagaagcgggattggattgctagatcatatgataattccatgtttaatttttggaggaaactccatattgttttccatagtggctgttcattctacattcttaccaacaagggttccagtttctgcatatgttcaccaatacgtgcttttttaaataatggctacattttttttctttcaactctagtccattgtgcatttttctactatcttactggccttttcacactgattcatagaactctctatattaaggaaactagctatttctgctctgagttcttaatattttttccaagtttgtcatttctatcttgattttaatatgacttatttttccaagcataaatttatttttatataaatttatttgtaaatggtaccaaatgctgattcagtatttctccattacttactgttcctgtctcaaccttcaaaactgcttcacttaaactctactgaattacttgcagggtccaattatgccatgtctttcccatctatgggctcttgtatatgttgcttcttctttgtgcaacgttctctcaatacttttctcctgactaattgctactggtcattcaagacttggctaaaaggctgcttttacagcaaaggctttccttaactcctcaaggctggtttcaatggccttgccctattctttcatagcatcttatgtgcactctgatcagaacatcacccttctgtaatgtaattagctacttccctgctttctcccttagatcattaagggaaaaaactatatttcattcattaattattgtatcttcagcctctagcccactggctagcatacaaagcaggtgctcaataagtgtttaagaaaaaagtaaggaaataagaaaaagcaaaggatggagagagagtgggagtgaaacatagagggcaatatgggctgaattgtgtctcccttaagttcatgtgttgaagccctaacccctggtgtctcagaatgtgactgtattaggagatagagcatttagaaaggtgattaggataaagtgaagcctttagggtgggccctaatccaatttgactggtgtccttaagaggacaggaaatgtggacactaagaaatacaccaaggatgcacaacacaaaataaagaccttgtaaggacacagcgagaaggcaaccatctgcaagccacagagagaagcctcagatgaaaccaacctgccatcaccttgatcttggacttctagctccagaaccgtgagaaaataaatttctgttgtttaagctatccagtctgtgccattttgttatggcagccctagcaaactaacacaaagggttagaagatatagaaggaaaaatggttggataaggaaatatctaaatctggacattagaggaatacagaaacattcatgagttctggcaagaaagtcacaactgaggaaaaaattataattctttattttccattcaggacaaagagataaagctgattttaaactaaaacctttgttctttagattataatgtgaatatgtaattaaattttattttgattaggcaaggctctttcagttataattcttacggaattaagtcataaactacaatggaattacatggtatgagaacttagtctgattataataagccactcaagcttaagaaggcatatgcattcatggctatatttcattgttgagactgcaaagaagtccctaaaatttctagtccatctataaagttggtatttttctgatttagtattttcctctttactacagggatagtttgtttcaaaaagatgcttttcttagaaaatgaagtttgacacaaaggcatactggattgcattataaaaaaagaaaaattaattattggacaccaagtccttgagagtgcttttgtagtcatatgtttcatctctgttgacagctgtatttttgtacagcatttaaaaccatctactgactttgacaaactgtccatttcccttcagatataccgactttgacaaactgttcattttccttcagattttgggaaattcaatatgtctatgacaatacaccaaccattaagtgagatcaagtcatatctagttttcatttcaaaatatgatagaactgtgtggaattatattctatctatattatgatagctatgatctggaggtgacatggttaatttccctggcagactataaaatcacccagctaggaatggtgaaagctgttaatcagaaagataacctttgaaagccttactcctttcataatggttgctagttaaatatgaacatctgggaaacaattatgaattcattgtgcataaatctattgccctatgtacagaactcctttttattacaaacagactttacataataaggaaagaataaatgtatcaacttttcattttttaccacatacttatttgatgcaccatttattaacaaaatcaacattgtccttggatgtccataacactggttataaaatagagataataatatttggttgagaacatatctaaaaggtttaatgttttagcaatgctttgaaattttaaatggtttgaatgtgctaatttttacaatattgtctcaaacgtttactttgatatttattttacatggtatgtaatatgaactgagaaaaatggcctttgttttttacataaatacataacggttgataaattttaaaaagtgacttccatgagccatttattcatctaatatttttactgccaattttaagataatctttcaacatgggcacctatactattcagttaaagaaatttcttcgaaacttctcataaacacaaatgcctgaaggcctaaattacttataaaaagtgaaaagcgaaagagactcatataatctttaactgaataaatatttttccacctaaccaaatctgactgccaacaccagaaggtttggagagaaaattttcataccatttgaaaaggaacactgaattttacacaatgggaaaaaaataaatagattatagctctggctaatggtattaaaacattaagattcttttgttataaatcttaattttgtgaagtatgtaactaggacaggccctaatcccaaatgaaatttaattgaaagttgtttttggaaacatggtaagagagatttctctttttagtgttgccaaatagagctgactctagatgcttcttcattgtcacttcagccaagttagaccataatgagaactagtctttttgtctttaatccaacagcttaaataaaatttaagccctagattttttattaaaatacatgaaaaaggggctttcagaaaacttggcattaaggatacacatatttacccataacagtaagtagcatgcatatgtataatgtaacccacaggcaaaatatagtatgcatctgttcatttatacttgtggataagggatttttattccctacagtaaacctttctacattaacattgaaggaaaaaaattctgtcaatacatcaatatgaaaaaaaggattgctaaagaagaaggctaaaatacactgtaaattaagttagaaaatcttgttagagatccttacaacatgtcatttacatttgtgacatttaacaaaattgcaattgaataaatatcagtataattggtttgctgttcatctctcccattatactatgaactgcaaaagcttaatcttgagtatctagcaagataggcacatgatcaaatacaaacagatggaaagctaaagtccagggtaaacctgggatgcttaagcacttgttttggaaaaaaatcactgtctacctagagagaggagaaaaggaacagtaagaagtaacgtggattgtccacctactatgggtactacaggtcagctcctatggtatagatgtatcgctgctgttaatacaatagctctagagagaaagtatcacagcctccattagacagctgggaaactgataagaaagagattaagtgaccctcctcattagtaaagtccaggactacatccctgtactctttccatttgacccttgtatatctctaaagaaagaaaagatagtcctttagcttttagtttcataaaggagaaaactaatactttctccatcttccacattagtgattcaaaagcttggctgctcattagaaccatttgagaactgtttaaaaagcatctgagtcctacagccagatatcctgattcagagatctgggatcctcccaggcatttctgtatttaaaaatctccacaggtgaacctaatgtgcattcaggcttgaactgctattcttttctaagcctatcaaatattctatccttatcctgccccaaattataagcatcttcctgattgaaaggatattagaaatgtttgcacacttctaaattccaggcattgtataaaagggtttcatatatatattgcctcccacatgtaatctcatttattagacagtagactaatgcttacataggcataattatcattcccttaatcttataaaaacaacatatatatatttatataatttctaaaacataccttgtgtctctcttaaaaatgtcaaatatgttgttcatttcaagatgtctttaacaaccagaaaaaaaaaagaaacagaaaaaaggcttccactaagcccaagaagcttaaggattctatttgtgctgcttcctgaccctacctattaaaatgcagtatctctaatgtcctacaaagcccttcacaaatatttatggatccccaagggttatcttatgtgtgctcttgaataagcactgccagctacatagatatatatctgatatatatcacatatatatgatatatatcacatatatatgatatatatcatatatagatgatacctgacattttgttctcttttcctgcactaggtatcccccatatccatgatgtctgaaactcagtctctgaggtcttcaatgttgtctaaatgtatttagcgctgcctccagctgacatatcactaatttaccactgtaacttgctggatactgctgcctttgccaaacattgtgcccatgtcttatggataccacaatctcctgttgcattctggccagtgaacctgagtccccgaagacctaaagttgctctgggttctctgaaattcataatatgtagaagttactctgtgttgcatgaaaagtggacagctgtctggaagtgcctcattccctgattcagggatgtaatttttcacacaaatactgaagaggtactgctccaaaggctcccaagactttagtgagaagttctttgtttttctctacagttctttcctgcctatctccctataagagtcacagggtattttaagggggaatgtccagtacatgaatcaagtgatgggcacaatgatattctcagaagtatcactcgcaacaattattaaagttttgttaatagttcaactttgtctaccttcatcctccctgggaaggagttctctccccagaaatgctatctagtctctcttgtgaattgtcttctggcaggtcagtttcaccaatctcatagacatgcccaaacgtgtgggcatttgggtgacagggctggcttaggctcaagctagggacaccatgatagccacataaatgtgaaactgtttcttggcatattagttaagaaaagaaattgatgattgaggtagtaagaggcaggtaatcctatatgttgcctcttatttgccatcttccacatctcacacatatggcacagatgatccatatctctgaataaatattttattcaacatatgcataaaaacctcctcctggaggaaaagttctaaatccagaatagaatcatgtccccagaatactggcctattaaaacaaacttggaagagttgtaggaaggggtaaattatcagatgccaagatcctatgtaaatactagtttatactaccttaacagtcttcctgaagatttcactttttttccccttctatgaatctgttctttgctctgcctccctctctctccaaccatcaaagtcttggctgggcttctcgttcttcctcatgggatatcatttcctgttcacgggtgttgctgcttcaggtctttatgaaaaatgtgcttaaaatttcttccatccagtcatcttattcctgagtcagtttcttctggttcgaatcttaatcctgggtaatctatttaccttgtcccaactttcaaagatactgccttttaggagtttctaaaaatctcaagtttccatgaaggtagaagcttctaccatgataaaatgtaggtgatttcatcaagtcctgtaatgtctacacctgcatcactctaattctttaacccactacacctgagctatgtttgtttccctgataaagactatgctttgacagaattgattggatgattggagcaatggcaaaagcaaggccctagaataattgtgtttaatatcctgactctgtttcgttcacaggttcatgtggtctgaaatgttgggacttcctcctgcagatgatggggaactactgcaggttttagatcagggttatataatacaattcagtctgtccctaatgggcaatatgaattaatgaaggaggacactaaggcaggtgataattagaatataacagaataagagggcaacagaatttttaaaaataaatgaggtttaaggtgaagaatgtgtgtgtcagctatggaaatgcaactatcataactggcaacaatttgaaagacaataaaatgtactaggtttaggacaaaacacatttcagataatggtatttaagttagctgatgacacagaactggggcttggagacagaaagtataaacataagtaaaaagaaaaagagttaaaattgtggtacagaatcatatcaccaaagaaaatgacagagagaatagaacaccaaggactaagtcaacctgggaatagccatagttagcagaatgtcaggggagaaaagtgaggttcagattttagctaataagtgaacattagaaggccgatttccatcataaagcttgttaaatggtgttacccaagaaacaataactcttgcttaacctttaccctggagcaaatgctcaaaccagctttggcaggctcagttcactggctggtactataccagaactccactctaatactatttttgaagactcatcttctaatgaggtgttttccatggttcattactacagttccctgaaatggggccaatgcacccttgctttgggctgaaataaggttgtagtgtgattccaaaatatttgtcaatacattaatagtttgcatggtagtagtacagacagtgcctgaaataaacaggtttaataagcagatgttgaagaaataaatgactggttggatgtgcaaaaatttaatcctatgcaaagtgggtacagaaatttgaatattgaataaaaatccttaatgacaataatattgtaggagttggcaaatagatgcaatcaaaaagattcagtagtgtaaatttccctaagcaaaaccattctgaaccaataaagatttagcaggcctggtattgagtgtccatgatatgaaaacttgagctcctgtgaaaactgcaggttaaatacaagccaatgatgttatgctataattttaaaaccaagatttatacaaaaatattttcaataagaaacacagggcaattatctcttcaggctcaccactggtcaaccctctataagggtacttattaggttcaatgttaggcccacaaactaaaaatttctctaaaggatttggaaggagtcctgaggaaactaatcaaagagattaaaggaacaaaaaaatgatgagaaaattggccccaaagagaaacacaaaagaaacaccatttatttaacctaagaagaagaagctgaaaagcaaataacaatcttcaaatattttgccaatgtggccagcagctgttctgtatcactgtaagcaggacaaaagaaaatgaacttccagagcaaaggcagcaaagtgcaaatgcaccactggtttttccccaaagaacttcctggctgcaggagctgggacgtactgtttgataggaactcaagagacagtggcatttccctctctctggaccttccttagcatgagtgtgcagctatatatttaaacagctgtccagggaagagggagcaattctataaacaaatcaaaaaaaacccttttctatctttacagttgtcaaaatcatcacatacagttaagtcacaagagatgtgaaaagaaactttcagaagagtcatttttctcaagattccttaaagggaggattctgaaccttcatcataaaaacggtttccttaaataaaataatgctattggttagctataagtctgctttccatgcatcccactgtgccattcagaaaataactggattgtatatttgcaggcaagtgtaaaaggacactctactttctattattccaaaaagctgagcatttatagactttttgaaaatatgttacatactttctgaaaggaattattcaaatgtcagtttaagcctataaagcaatacaactagatggcatttattattattccacttcacttcctttctcctttaggagcaagggatcgctttacatcaggttccaagctcagaaacatttggctacagtcctttctaatctttgagtcagaaattacaaagaacaaaacaaaagatgattctctcccatctctttcatgtattccaaattctcactgaaatccaggaaagagttattacagtgttttggttggatattcagttttaaaaagaagccaaagaaagtcctttgtagatactgtatagaaatgcagaacctagctgggattctcaaggcaagcgtggtttcagaatcacctgcataggagccgcatcactactcaatttataaattcactccttcctcccttaccattgagccaggacaataaggaaaatgagtggcaggtccatacctctgccgacctacatcttcctggtacatggattttccacaaggatcactgtcactcagctgtaacattgaacaatattatatctggttaaacatcagcttcctggaatgtactgttgactgtgctaaacttgcaataatttctgtttggctttggcccttgtttctatcacagctttttgaactctatcttctcgtaatttttgaccacacatcattccttaaaactgattatattaaaaaaaaaagctctttaggtttcctggctctatcctctttccctggctataggcagtgccccctgatggcttcctgggccctgcttgtctatcctgttctgtaacagcaatagaaccactggcgccttccaacctcaattggtcagcttcatgtatatattgtgacgttaaaaaggttttcatttatttggagcccaattcagcaacagacaacttatttacctcagcatctagcataatatagtaagcacagtatggtatagtatatagtaggttcttaacatttgttgagtatatgtatgaatgaatgaaagaaatcctgacctgcaccatagtcatgctactaaagtgattttgttttagagactagacatgctgtgcaaaataacttaactctgttatctatatttccaggcaattgtaaaataatcctattttctattagctatttaaattaattaaaattaaacaaaatttaacattcagttcttcagttatactaaccacatttcaacagctaaacagccacatgtgcctatgtctaccatgtcagacagtgcagatatagaacatttccaggatcacataaagttctattcaacagtactagattcgaccactttctcatttgtccatataaatactggtcctttatatactcttctgtcaaatactggctgtatctaacctttccgtattcttcaagtactaaaactccttgccttaatccaaaataaaatcacgcttcagcttattttcccagtctggcaacctaatggcaaggatcatttaaactccatgtatgccatatatatatatatatggcacacacatacatatatatatatatatatatatatatatatatatatatacacacacacacatactatgtacccacaaaaattaaaataaataaataaataaactgcagcaaggagaaactttagttgctcaagttatctggagcataaaatacattgtattcttggtgtgtttgtgtgtatgtgtgtgtataagagacacttaaaccaaacatttaataccataattaattacttcattctataccctatcccatacaaatcctgatcatcactaatatgaaatatattctatggaacacgagagaacctgtaacttcacattttttcactaatataaactttcttcatatttataaaggcactgggaaagccctatttaactgcgtgtagagcatctaagtaatgaaatagttcagatgaaagaatctatagcaatgcagaaggccattcaatgctaagggaaggtgtttaagcagaaagcaggtttttagcagacctcatttttatttttaattttatttatttttgttaatatggaactatgtttacaaatagtgctgcagaaacttgcaatggcttcctgggccctgcgtatgtagtagtgcagttactacatacgcaaacacttactggtattcaaactaatcctgtgctgaaagaagagatcctcatatcttccagaccacagtatcttagtaaattagatattgtgatttgttattaagatcttacaaatagatattcacccacaaaggagaataattcaggtcaagtaggtggtaaagaatattactttttatttatttgactagagtattgctgtggggtacaactaggctaataaaaacattgtatgttctggtacatttctgtatttataacattaaatcacagttttatcagacactagagattatcatacctcccagtaatagcacaaatatgaattagctgcccaggtctcctcagccccttaggaaatcatgatatgactcactaaaaaaactggccgaatgcccacagaagccaatcaacttttgtgggatgaggtgaagtccaagtgactttgcttaccaaggtgcaatgaatccagcaaagctgcaacttaactcttgtttaaacctacttcatcttcacaatcttacagtggccatagcatctcaactactgcaaataaaaatcaaaaacagactctgccaagtaggtcttttgattttataaaaaagatcaaaagagtcagagcaatcagtgcagcaaatggtcaccttgagaaaaatatagcaaatctttaacacatttagaaatcatactagatgaatttatgcaaaaaatcagaattgcagagcctctgccctgaatgataaagaagttaggaactttcaattaagcatgaagaattaagcattgtgtttatttacgcttccttatttcctactaaaatgacaataaaaactgaataaatctaaaaggacaaacaaaacctgagaagacacaacagcagacaaaacagcaacaaaattttggaagctggacaggcacgctagctcaggtctgtaatcccaacactttgggaggctgaggtgggaggatcacttgaggccaggagttcaagacaaacctgggcaacatagggaggccctacctctacaaaaaaatttaaaaacgtagccaggcatagtggttcatgcctgtagtcctagctactcaggaggctgaggcatatagatcaacttgagctcaggagtttgaggttacagtgagctggaatcacgccactgcactccagtctgggtgacagagcaagactctgtctcaaaaaaaaaaaaaatctggaagctactgaatagtagaaaagataactgcccttcactaaagaaagctcaattctaagtttgcaaaggaggttagcagtgggaaaccagtaaagccgcagaactgcagaaatgttaaggaactggaggcaccaggtgtctctggaggcaccaggtgtctctggaggcagaggtgaggggtagaaaagaaaaaaaaagagggcagttaagtacttgggttctagggatctgcatatttcttcctccctcctttacaatcagaagacttctcaacctcatcaaggcagaagactggaagtttattctctgaaggtgcagaatcatgtaggtgtacaaatctgtgtgggtcactctccttcacttaactagggaattaagtgaaagtctacagacataatggagaggcactctcgcctccccagcttcattttgccagaccttcagcttctccctacaccagcaaccttccccatccccaggcagaacactaaaggtctatctctgagaaactggcctgtttatgagaaaggcctaaagatattaacatttgggagcaggaccctcacatagtttctccagtttttatctttaccagggacattggctgaaggtgagtgagggataaaatccaagccctgctccacttaccaagccctgtgccctggggaggggctttgttaggccagggggaggggctacctttttctaattagcataaaggcaccaactgataaacaactcacatgcctcatgggatatctttttctatttcatacaatggagccatatagattaattgtaattctattgagaggtcccccttgaaatggtcgaaatctttcctgattttccttggtgaaatgtgccagtccacaggcaatccctcttccccccacatatacacaaatacatagagcttccagttggcattttagttgtgcacctttaaaatacgaatggacagccaagggtcacccattatgaagaaaatctgcaacaccaaaaggaaaaagactcaactaagccaaaaaaggaattgaaagaaaagaaagataaaacttgaaaaaaaaataaaatctgggaaaaaagtttgttatcctcagagagataagatagtgcatccagaaaataagaaaggacactacaataaaaataaaaaaaaatcataaaagaaaattcagcagaaggtttgaaagataatatggaagaaatctaaatggtagtactaaaaaacagaaaagtagaaaatagagaagagttaataaaatgtgagactgagtgaacaaaaaatattcagaaaagaaaagaaaatgaaggatatacatatatgcatatattggcacagggctacaaaatttcagaagatatgaataaaaagaagaatctaaaagcttccaggaagaaaaaaaagaagttagaaaagggctaagacatcagaatgatgccacatttttagcagtaaaactagaaggtggaagacaacaaatcagtatctttagaaatctaagaggaaatcatacttagaattcttgcttagtcaaattacaactcaagtaggagaaagataggcctgtgtggaaaatgtatgtcctatgtacttattaggaagctgcaaaaggatgtactttacccaaacaaggggataaagaaagaaagcaggaaacaggatacaacatagggaagaggtgatgagaatgccctggatgataatgaaagatgtgagctctgaggcagatctagagataaactagtcctgagagtagtaagagaaaggacagggctgggcatggtggctcactcctctgtaatcccagcactttgggaggccgaggcgggcggatcacttgaggccaggagttcaagactagcctggctaacgtggtgaaacctcttctctactaaaaatacaaattacaaaaattagctgggcatggtggcacatgcctgtaatcccagctactcaggaggttaagtcaggagaattgcttgaacccaggaggcggaggttgcagtgagccaagaccgcaccactgcactccagcctgggtgacagtgcaagactccgtctcaaaaaaaaaaaaaaaaaaggacagaactaagaagtaatgtctccagaaaaatccatcaatcaatcaatagaatatctaatgtggttaactggattgaaagaatgtttttagttgtgccaacaatttggctataaattaatgctaggaatgtcctcaaaattcctaatatcccatgcatctggaaggaacagaaggcactgttatttgagtggattgggaaaggatgtagaaatatttcttccttactctttatacttccattaggataattttctctaaaaaatctccatccctcctcccactcctcagtcctctacagatgtgaatttaggagagagggaggcacttgaaggaggaacagggtatgcaaaatccagcgtcttcctctatttctagaggaaacctcaagtttgatctgcttctccctaccataaattgtataggggcaggttctcccctgcaaaggtatgtggttttctagtgctgcctctgactgggtgggcaggtctgttcagtattaaatggctacgtttagctatacacattcttccaacatgctatatcagtaacaaaagtggtttgctttgcatttgcctgattcctttcctctttctctctctcagctggttctaaattttggtaatgaaaaggattgttatttattgctctcccaaacatcaacactgttatgattgtatatgtgtgtaatgatgggtagtagtgtattttactgagtaagcagtatgcaaaaaggataattactcatatttaaaattcaggattaaatgtctaatttctgaaggtgaggaagagagcaaagtctacttcccataattatttcaagagaagatattttaattatgaaacattccaaacatatgaaaagaacagagaatactataaaaacacttacagatcatcactcagccttaacaaatctgaacattgttatttttgttcatacaatatattgagaaaccagcacaaaatagatctgaagtcctctgaaatcacttacttgtttcttctccctctcccactatcctgaaattgttagataccattctgatgaatgtgtttttccaatacttttactatacacataggtatacaccatatagtattgttttattcactttagcatttaaatatgtggtatcatatggcaaatagaattctgcagcttatgttttccaggcaacattactaatgaaaaaacaattcgagtcaatgctagtcagctcaagagtgcctgacctggatcaaatcctggctccaaggcctttaaggcaagtgactttatctccaaattgatatcctcatttacaaaatggtaataataacgtcccttcctcatgggcctcttgtgaaaagcgaatgggtagatactcatacagcactcagaactgcacctggcacataccaaagtatctgcaatagatcttgtttctaaatggtgactttgatctgttgacaagatgttgactacaaatacattaaacttatttctaccaccttattctttgtttcctgtttcttttgtttctttttctctgtttttgtgacttttagttaattgacatttctaactttcatgttttttcctctgtcaatttagaagttacaattttatgtagttatttttttgtggtactcaaaatttaactactcgttcaacatatgtatatgcacctctttgttgttgtttagcattttagtttaatgtttaacaaactaaaaagaaaatgctatttgtttacagccaacagctaattacatttacaaatatctttctgtgctcaccattgcctctcatacctcattttttccctttgcttttgcttttcttaaacataacttttgataattctcatagtgactgtatgtaaatgataatccattattatttttagtactgaaaatataacatttttctcacaaaatatggctttgattctggctaaatataatgccatgctcagcaaaagctttcgcctaataaatacatgccaaacgaatgaacaaatgaataggtaaatccacaggaaacaaagagggagcaccaaggcaggatcatcaaagaagcctgatgagataacataatgttttcagaaatgcacataatttcacttcttaataaataaaaaataattcactttacaaaataaaagacgctagatgggaaggaaaaaaagtttgaattaagtattatttaatagaagttaaactgagtaaatgttctcagtgaatgtccctaaagccactggtcccaatatttataagtagaggaaccaatcattacagagtacaacatctgattttagttttcaggattacatggaaggatacagaagtacaccagaggtcagccttgctttatcaatattcctacaagtttgtaggtattgctaggcaacaaagagaaacataaaagcagaagggcttgttgaagtactgaaaaaaaaaaaaaggcaactataagggaatgttttttaaactcatcttttagataagttgtatgtattttcatttatcttgactccaaattgaatttgagcatttgaaaaacccccgttagattaggtacattacgattccacttagtctagataaaagctttatagaaagagcaaggacattcaagttatgaaggcaaagtgcttttttcctggttagatgttagcaatgcaggcactccccactcaaaccactctgtagatctcagcaccactcaatcatagctgcatatttccaccaattctggatttttgccacctttattcattcagtaatttttatataatggcacatactaagtcagggcaccatcttctgccagaaattcccttttaaaagctcattccactatcccagtgatagtttttatgggtttccagcgatctgtgaagtattcttatgactaaatattacgtagattgacattactttttgctctggtgtagaatttctttgttctgagattgaatacctttaacttgaaaaaggagagagtgaatgaggaaaattttagatcagctctttagggccagaaacaaaatcattatccctccaaaaacaaatattgagtaatccctacaattagatgaggcagaactacctaatcttgcttgcttcctccaacccccatctctacttagcagtaaaagggagtatcagctcaagtcttagttgagtgaagcttttgaaagaattaggtcattaaagtcattcttcaaagtcccttctaaattttagaagagtttttgttgtcagaatcttaattcatgtttacgacagcctttacatttctgttaaatgcataatctaatttgtatctttacattttacatacatataatacacacaatcattgtgtataatacactgatgcacactttacaagacttagaatatggaatatgtttttattactttaagttatcacagaagattttagttattataacttttatgatactccaatggttatatctaaaattgagcctgataaggaatgcaaatacttactagtatactgctcctatgggaaaaataaatgattgatttttccataatctagttttatgatattgtttctaatgatgaaatgtaatgaaaagcaaagattggttccatttgggaaccaatcaacaatagaatttagcaaacacttattaaccttttactatgtataagctattcacataaattctgtggagggtacaattaaaataaagcataattattgcctcaagaaacttaacacttggtagatcagatatgtactcaaacagttaaaccatcgtaaattctatagaaatcctaaggataaagtgttagataatcacagagagttctgcagattgtctaataattacagtatcaatactaatcttctgaaaagggaaatcatagatattgaaaaatctgcccatttacataaaggcaatgaaaatagagatggcagagaaccactcaaatcacatgcaaataaggatttggaagagaaaaaccaattaacttaagaagggactaaggactgacatgatattttaagaaatgaaataataagaaggtgctctaggtaaaactgagtttctagaatactttttcatgaaatatttatgttggtgctgcaaaagtcaaaatcatgttattgaattattctgtcatacaattgttagaaaattgtgccccaacaaaataaacatttaattgctctttgtatattctaagaattagcacataatttcaattacaacctaaatttattaattataagtaaataaacatgtttgtaatgtataatctttagtttcatttttcaagttagagtgccagtcaattctcttattcttatttattaagaaatgttggccacagcttggccttttctttagtacaaatcatcattggttaaagagcaccaccaagtattacttttggctgaggatagaataaaaggataaaaggaggcagccttgaaggatgaactgagtcttaacagaaacatggaaatactttctaaagaaaaaaacagtgttagaaaaaagatacagaaatggaaacatatagacatgtcaagaagaaaagaaatactttgatttgaccttaaaggtcagttgaaatcagatttttaaaagggttttgaagacccaattttagtccataagcactggggaacccctcaaagtttatttgcacaggagagcaaaattacctaaggtactgttaggaatagtactttagtttcagttgtgaggatggagtgaagtgggatttgactaacgataggcagatcccttaaagggcttctatagaagtgcaggcaagaggtaagggaagcaggggattctgacagacagaatgacaagacagggagtgacactgcactgaacatgaagagagaaacaggtttggtgaggacagtgatgtctaaagtaaccatacacaagtagaatcccacaaatagtctaaaccctaggtctaaatcttggaggagaaatcagtctaaaaataaagatttgaaatcttcagcacggaaagccttggggtagatgaaattgctaatgaagggagcaacgaaaacgaaggtccaagacaaagccttgaaaattgcctatattttaggaggagagagaagaaataactaacaaagaaggaagagaaggtgtgattagagttagaagtagaacaaggagagtttcaatcctgattagctaagggaagaagaaatttataaagaaggcactgaaacaaggaaggcagactataggctaatttagatgtcatgatgaggaggtcactggggatggcctttaagagaatgatttagcaaaggacaaacaaaagtggtttaaatttgttttatggactggagacctgcagcattatgtaacatagaagccctgaattaggcaacatttagcaagagttctacccttggctcccctgtgtagctgtgtgacctaatactggtcatataaatcctctggacatgaacatcctcaccttttaaaataggagacagcagaggcttgaaatagggaattgctctgagctggcatttcatactaactacaattataagaaataataaaaaattattcttcaataaataaagattttagaagttattaaaagcattggcttgagagtcagatacacctgagattggtgctagcttgaacccctaatagtactgaagaagtggtttaatctctaaaccgtggattcctcttgtgtcaatgaaatcagtatcagcaattccatcataggctgtgttgagaattacacaagccatgaaaagataacagtatagttcctggactctaaaaaggcttcataaatatttgttggctaaatgaataaatctcaacttgtattcttagaaaggaccaaaagcaggatagaatcctgtgaggaaacatcatctggaggagatgagaccttgaaataaataggaaatgtgggagttggagggagacatttacatggacactaacagacagtcaggtatcagctgggttcaaatataagcactgtcatttagtagcagtgtgacttgagcaagtcacctaatcctaaaccttggagacagaaaaaatcaaagcaaaaatggcaaatactttacataaataaatatgagagacgggtccctgagtgtcagttatattgttcatgggtttttaaaaatacatttgtaacatttcataattaaaaagttttgatcaattggggcaataatatctatataacatgaggattaaataaagtaatattaaaaatcatgacagtgtttttcacatagttctcaataaatggttactgctatttcttactgtaagtattgttattttcccattctaggaggagacaggattaaagacaaacaatggaacaaacacaagtgtgtaatgtgtataagtgagtatgtgtggtgagaggagggtagtgaacaaagcagagataaaatcaggttgactgaaaccaagaaggcagtctgggagtagttgtataggttggaaacgggagagggaagaaggacttattatacagaaggttttaaaagccaggtagtgggggaggggttgggggagggagaacatcaggaagaatagttaatggatgctgggcttaatacctaggagatgggatgatctgttcagcaaaccaccatggcacacgtttacctacgtaacaaacctgcacatcctgcacatgtacccctgaacttaaaagttggaaaaaaaaagataaaaaaaacctaggtagtaggactcattactgataaaataaacaataatgagtccctacagctgaagtttgggtcaggggaaatacaaaatgagagtagtgcttgaagagtcaaatgatagaaataataaactagagtagaagaaagtgttgagaaactatctcagtaactcaagtcaagaggaaccacagctaggattctagggaaggttgaaagtggaaatggcatatctcagatgaaccttttcttagaaagaaatctgcaaagaaataagatgacttaaaggctattaaagaaataaagagaaagtagagagaagaataaaagataatgctaagattttgaagatgaaatatcctccatctcagtaaaataaaatagaattgagagatctgagagatggtatctagaggtgataaggagcatggactttccaatcagacaggcctgagtttgaagcctggctctgatacctaacaataggtgcaataccacataagtgatttcacttctctgagcctgtttccttggccatatactgggtataatagtggtacctccctcacaggggtgttatgtgaaatacctaatgtttggaaaggtattagcatagttacagtcatctttatgctccttgttctcacaccaaatatccagtccatctgaacatcccactgagactaccttaaaaaacaaaaagcaaccgtcaattctcagcccactttctcctttgcgcaagcaatcataatttctcgcttgaatcactacagtcttcttcctgcactttccagtcttgccaccttcccccaccaccaatctattctccacatagcagtcagagagagcatttaaaatatagatcaaattacatcactttgattatttaaatcctttaatggcttctcatcttataatgttctacaagatcctttatactctagctcctatctacctcaccagcatcatctcctactacgctgtccctcattcagcctgctctgcgtcacactggcttccttgccgactcccaaatacaccacacacgctgttatctcagagccctggcacttgttccctctgtctgggacattcttccccccatgcaacatggcctccctcctcaagtctccactcagaagtaacctcttcagagaccatccttcactaccctatccttcacagcagcacccctacctcaaaaccaagctgtcaactttccccttacctttactttgttttaaatccaaaacacctggcattacagtcaatattggtttatatgttgattgtctgtcttccactggtctttatccaatttgtttattgttgtatactctgctcaaggtgagttctcaacaaatgtcagtgaataaatgaatgaatgagcgagtagcatattaccaatttttaaaagcaacctggattattaagtaatgtggaaaataatggatgtttaacaatggttctagggttcctgaacttctagagatcttggaaggcagcaatgaggaatccagtagctattttatgagtttctaaatgtctagtaaaaagcaaacctttactcacaagaagaattaagaatataactaaaatgttaagcttctatgctttagaaaaaaattactatcaactcaatacagtaactccggttgattcctgctgatcagaagttattgagttatataagtttttcactaataaaactgaaaattaaaatatgtataatctcctacagccaagtatatatgcaacagaaatatacacaaattgttcaacatgagaaatgtacaagaatgttcacaggagcgctatttataatagtacagactggaaaactacccaaatgcccaccaagggtgaaatggataacatatgctaggttcataccatgtggtactgcacagcagtaagaatgaaccatttctaactacgtgtaacattaagagattactcagaaataatgctgagtgggagaaactaaacatataagagtacacactgtttgatttcatttaaatgaagcacaaaaacaggcaaaaaaaacaatctatgctgtcagaagtctgggtaatggctagccactcagggtgggagaatgggagagttaggggctggaagggagctaaggggggcttctcaagtgctaatgtgttttatttcttgattagggtgctgactatatggatttttgttcaatttgtaaaaattcatcaagatgtgtacttaatatggttgtgcttttctatatggatattatatttgaataaaaagttttttaaagacaatgaaaaagatagtattgatgatgataagtttgcaggcaattctctccaaatcagggttccccaggggaacttggagaaaaaaagaataatgcctcttacaaactttttgtacttgtgaaatcacttgagagtttcagcagtggaaaaatataattaatgttcagagatggttaatgcagcacaattatgtggaaataatttgtacacaaattcaaaacaagcctcagatgtagagagccagacagggtctttatttactcatttgtgattccgaatgaaagcaatctttctttggagattaacctgtgactcccacaaatacatgaaagtgtctggcatgcacataagggaagattgactcttagcccagaagttccctgattttgaaatgcatgtgctaagaaagaaccttatttagaagagatgaccagaacagctgcactttgtcgtcagaatcaaatccacaagtattctaagacttcaaaaaatacaacaaacaatgtgacctcattaacccttagaaaagacatttctgccactgttgtatctgatcaccatttatctcccctcaaaatctcttgcaatgcctgtcttcagagattcttccagaaaagcgtaaaagtaaaacttgaaagaaataataaaatactccttaattcctagtgataataccagtgaaatctgattttatttttcttttcttagtaagttttcagcatgttccattgcagtttaatcttatgagggcctaattatggattgaggcatttaaggcaataagaaaacaatagaaaaattaaggaagatttaggagatggttttagaccttattctaccatttcctttctttcagttttccaccctatgaaatttatttaagaaaatgtatatggctgctgacttgggctacggaaggaagttataacatctacttgatggaaaacatttaatgtaaaagttactagccccatttaattatttggaatcacttctccccaacaggaggtggccaaatagggtgtctcccagatttatgacttcattttgttttctgcttccataaacaatattaagagtccctctttaatggggtgacacattctgtgcccaccagaaaacataatctctaaatcatagtgaacataaactgtagttttaagagatttggaaactgtttctaaaagactaaggaagatggacaatggataaattaatccgcaaattcaggcaattttagagagggagaataaaagaccttcagaatagcagttttattatctgcataactaggcaagtctacattgtactttgtgtgcatatatcttcttgttgaataacaacactgctttacagtttaaaatgtttacagtttacaagttactttcacatatagtatgcacatataatatcacatattgaaaatactaaaaattggaggggtagaactagatcaattaagatgacaaaggagaatgcagaaaataatagcataaattttaatccagaagcattttagagacagaatacaaattcgtcacactttaaagaacagaacccagatacttggcattaaacttttccatgggacaccaagctgctacagaggctcccagtttggcctattttcttggtagccccatagtcacttgagtatgagctccatatagcaaggatgctacctatttttccaccacatatttatccatagcatctcatgcagcctctggaaccacagttatccctcagtacatctgtgttatgaatcaatctctgtaaatatctaacttactttttaacatgggatatctaatactttcttgagtctgatttcaggttcatgattttagagtcaatataacatattaaagtgaaatcacataaaagaaacatttatacaagtcaatctgtatttatttttaaatatccatcaagataatttatcaaatatcattcatgatctaatttttcaatattcacctttatttgttccatcaatagatttttcaccacagtctacatacaagatactatgctatcactttaatactacagcccgtaaactaacaaaagttgagttagataccaccttcaccaaaataatggcaatataattcaaatataaaagttatattgtggtaaaaagtatctcaaataattctctggttttcgaaatgtatgtattttctattttgtgaccttgttaacacatttttataactaaaggatatagtttctaaaaatgcctgtggaacaactgcaatatgctacgctatcatgcaaaattacaagatcacgtattcctccaaaggccaaagacaagcatttcataagctattagaacagcaactgtattcagctgtaaaaaagtaaaactttcttaaagtaaaacaaggcatccactacttcacccttggagatgtgactataaaagtattataatttttcaacaaaggtaataattaacacatccagatgattatgctatttcaaaagtgttactattttacccaagttgttactattataactattttgaaagtccccttctggaattacttttagagaatgcagcttaatcggttgactatctgaaagcaaagcaaatattttccctttgaaagtgcaaaatagttctggaagagtcaataattattcaggccatgacaagtgaagtaggtgtgtatcacaaagaatgtgtggctacaacagcaatttgaagaatttttccagagtggcttcaagttcccaaatctattcttacatttgtaataaatgtcaaataatctttttaaagaattgtggaataagtgtacttttccagagaaactctctcaaggacaacatacatttttaagaaattataaataatttaaaaaccaagcctcattactttacaggcatgccacatatagtagcatattttttcacacatcaaatctagattaggcaatgtgtatcataatttactacaaagaaagataatttgctaccctcaatcaaaaactgagttgtggaaactccaggtttcgatgtcaccatgatcagagtcacattttgttatattatggtcatcataagtccctccttactgccaaaaaaaaaaaaaaagtacatttcttaactagcttgaaactaaaattctaaaatatggtttatgtaaaaaatgtcaacttctaccagttctcacccttgagaagtctctgttaaaaatgcagcctgaccatttctgttatatagaaaggaaagatttaaactttatgagcagtttcagaatggaacataaatcaatataaaaactgaattctttaaaagttttctaagttccaatgacaagtttaatacttttgtctaaacaacactatttagataacgatcgaaaggaacgacatatctgtgtacgtgtcttaactccttttcactactatgtaagtcatttacttcatgttgattttggcagatcctggcttttcacaatgaaaacagatacttggccatgatctgaaattaaatgctgaaacaggatcaaacatactcttgaatatccacatatccttttttattaatacgtagtatgttatgcaaatgacctacagtgtctgacacattcaacccctttggcctttgacaagtagcaacaaaataagaagcacatgaacctctctagactgttccaagaattagtcttgagaacacattgtactaagaatcaggaaatcagggtgaaaagattatgttttcaaaagaaaataatcgtaacttctttagctgtagaagacagttgactctaccaatggctccttctttagccttaaaattggaatatatgtattcttgtctgggtctgggtcaaattgacccttgaggcaaagagaaatatcctggttgtgcccctctgggtcagtgtaggatacaaacaaggacttcctgcctttgaagtttatttgagggttctttatagtggagggagcctaggaaggtgatgtgtctgtctggtgagcatagggcatgaggaactagggagctgggaaagatgaggatattaaatggaaccctccacagcacaggccaaggacatgatgaggtatttctgggggagaaggagagagataaaagacgcctttgcattttccttggaggaccagttatatgactgtaagagcccctttccactgagtttctgtttaattatatctcttgttttaagatagatccctgtgatataaaaacttcaagttatagtgaatgaaaagctatcatatcagaataatccaggcccctctctaaatcgttgaacctcacatctcagaatcagctctgagggcctgactgtgaggctagattcaagcatgattactccatgctgcgtgcacaggagttttggtgaaaaaagaatgaagtccagggagtcagcacgtgactgggaatgagaagcacagatttccctttttggttctgttgtactctcattaagtgcacttgaaaaaatatacccttgtttgtctttgttttatctaaaaagacaacgtgtacatcttctagatgggggagcacattcacaattccagcacaaactttttctgtcaatgggcagccatacttggtgtgacactggtgacctcacagtgaggcttgtccatgtcacagaaaaggttaaatgattaatttgccagattcgattgctaggaagagatgggacaattccagtcagtataaatcagctaagcatttagaaactattatcaggagcactagacagcactgcatgatcttctgcaaaccacaagtgatgtcaaagctgcaaggctgccgaactgccagggctgaagcaccgataatagatgctaaaattactgctgaagaagcatatttgattacaaagggcccctagagcagtaaagcacttggaagccttccctccgagttttacaagaaataagataagcagcatctccaactgtaatcacaaaatataataaaaaatgctccaggttctcatgagacatacaagtgtattttccttgaatgatttaaaaccattattttcctaacacacaacaatgaggacaaagttaccagtaaactgaggcaacctctagttggtaacacagacaactccatgaggagtttttgtttttgtttttcagtatgctttaaaaagaggtgggcttatttaaattgacctcaacctatgcattcccacctttctactctttccccttgttctcaagcctcaaatcttaaaggattactacagaatcctttctgctcagtagtttccagcctaattcctcatgctatttgctgatctgatattgctgccagcctctttcctctgccgcactatgactccatcctctccccagcccccattttcatccacagctcccagtgttcccatcctaggttctgcctgtttgtgaaggagaaagttgaggcagtgataactgtcaggaacaaccaaacaccaacatacaaagaaatttgctccaatattttttaaagttctaaaattggttatcaagcaattcccccatctttttcagtaacttcttaactgctactttatattttcttgttatatgttttacaatttagatgaaccaatgggctgtctagttgtgaaagtttaatctgattaaaaaagacacataggaaatgaattaaagtttcaagaaaatgtttcaggaagagcaaacctaaaatacacaaagacaattatttaacagaaacaatccattaaaaggtactaagtacacacaaaaaaacttcgtatgtctcaaaataaaatcaaccataataaaatgcaagacatgccaaatgcaaagattctgaatgcattaaaatgacaacagagggcatctttgaccagtgggttcctacaagttagtcactaaaaaccagtttgtaaaataggtcttgagatttgaatcctcaaataaaatatatattatttgctttgtttgagacagcataagggttttggatagaattgtgagatcttagtaatctgactacagagaaaacactatattcaaaatagaaaatctattttctgttaagtctgaaaaatccaaggcacagcagtttaggtctgtagagccagatggcctaggaaggaaccctcgctcaggctcagtcacttataagctctgtgactttgggcaagctacttaccttttccatacttaagttcatcaggtaaatgggattataatgtgaggactagtacaagaattaaattagctaatatatttaaaacaccttgaagaggatctggtggatagtaagcactgtttaactgttagctattctttttgttactcctttctccttttcattcagagagagagaatttctctacatacttctaagattgcctcatttaaaagtacctggtggaataaggaatgataaacatctgcatagtttttccctatatgactggtctgtggcagagataaatgcactcttcctcatttgtttctactgccagtttctaccagagtgaggcactgatatttgtcaatcttctcttttatatttctgttttgtcccatttcttcttactacattcataatacaattagataaaagtctggtgaaatttgggtagagaaaaacttaataaagtaggtctaattatttggctatcaaactaaaagttttgactcacaagaatcttttccagagttctccctgcattcagataatccaaaaatgacttcgacttaaaatgtcaagtgtggcctgtgggtaagcaactctgagaagaacggacatgttgcattctttggttttgaaattacaaacaaatatgggtacctgaatggtatatagccactctaggagacacaacttcaattccttaaatgtatttagatgaacactgaatttcagtcttctttcatggctttggtgggaaatatgactatggaaaggatgctttcatatagcagataaaggtttgttttgagtttgatttttttcaactaaaagtttgaaagatggtatataccatttttgttgtacagtgtagaatgcagaattagtgtgtctaccataaaacccatgtaccgctgggataatcacatttggtagctatttgataaagacaaatacactccagggtgtgttatcctggatacctctgctttttgggtgtcttacattagcagcttgtctcataatgtccctttgcttttcttactctagaagcccccttcttagctggagcgattcttctaagatcattaattttcaggcatttagcactacaatctgtattttcaatgtagtaaactactaagattttcccttatcttatcttggaagttttatcttcccttttctagaatacagaccaaaaatataataaacagagaaagactaataaaaaagaaaaagtaactgtattagtccattctcatactgctatgaagaaacacccaagactgggtaatttataaagaaaaagaggtttaatggactcacagttccacatgctggaaaggcctcacaatcacggtggaagacaaagaaagagcaaaggcatgacttacgtggtggcaggcaagacagcatatgtacaactgccctttacaaaaccatcagatctcacaagacttattcactatcacaagtacagcacgggaaaaacctgcccccatgattcagttacctcccactgggtccctcccatgacacgtggggattatgtgagttaaattcaattggagaactgggtggggacacagccaaaccatatcagtaacaatacagagtcaaaataaattgaagagtataattcagcattatactgctattatgttaaagggttgacagtttagttctcaggaactacattatctcaaaagataatttttcattggtttctgccatatctatgtatatatctaagtaaaaacataatgccagacttggctgtttcaggtaaaaatatccaaatgtatatactttaaatggaaattctaagtaaacacatattttatcaatagcactaatgaatgataacaattagctaagaaaatctgagtcaccattcattcattcaataaataattattaaattaaaaattatgtgaagggccatgtgaaattaagtgccctaaactggtaggggggagggatattgagaaaaatatatatatgacaagtacagtgccattaagaggtaattatgaggaatatagaatattttcaatattacatttttaatggcagaaaaactgcaattactcttataagttaaaattaaaaatttaaaactatataattctttaagtatcataagtatgtttgagttcccttggtttattcatataaatatatatagctccatattcaatcatttatatctatctgattataaagtcattttgtaaatgtaagagtattgtggcactcttgtccattcagaacattttatattattataaaaagaaaaaatgatttgctgatctttccatctgcttgaaccagaaatgaaaaatataaaattgtaaaataaataatggtgactcttaaaaactctgaaaagttaatacaaagagttccctgatttatgttaactttgagaattaagtcagagaattaagttttgccctttgtgcttattgctaatagacattttgagtttttttcctattttcatattagaaacaatgaataagccaatgaaaacattatcactggagaaacttccgataatgacaatggtaaaatctagtccagattgttggcttcgtgtgagggaaaaatagaaattttgtaatctcattcatggttcacaaaacttgtgtcatatgtcaataattaaacaagaaataatccaggcaagaaatgttaaaatctttgccaactagccataaacttattattgaatgggctagataaaatttctggataataagtgttagaaaattcaacaatactacttcaaaggcagccagacgttgcaagtccaaaattgatttcttaccatgaaaccaaaaaaaaaaaaaaatggttagacagaagactgtaccatgtgaatgacaggggaaaacattatagaaagactatgatgcatccaaagcagatatctaaaatatttagtgggctaaattgatagtatgtgcctgtgtgctttattgtttgggaatgaaaggttgaacaggagcgtgagctttttcatttcattattctgaagcagtgatcctaaaggagatatcaacaccttgcgataatcttcagagatgtcaggttctgagttcaagtcttccttttcttatttacttttaagttattttccctcttttcacattgattcatgatagcactaacccaaagaacacacttgaagtccatgatcactgggctcaaagtggaaacatgtgtgcaagtgcatccatctgcctgtcctggcacatgcatgttagccctggtatgccattttgaactttgcaaatttgaaaagcaagtatttcttcaaatattctaaactagtaaggttttacaaaatctactaatatacatatctttgcaacatgctaagagaaatacagataaaatagactatatctgggttaaagtaaatatatttccaaaatgtcagcattttgaaactttagagaaattttggtttttctagttatgggtaggatataaatcttctttgaagggacaaacctttttctctagacataaagagaattataagcatagcactaaaatgtctatgcttaaatgagtccctaaacatttccaagtgaattgttcaaaagttcttagaagttttagtgatctgttgcattgcatggggatcatagttaataataatgtattatgtatttcaaaattgctaaaagaataaatttttaatgtactcaccacaaaataatgataaattggtgtttatagacatgttgattggcttgaatgaatctttctgcaatgcatacatagatcaaaacatcacattgtaccccataaaaatacacaattattatttgtcaattaaaaataaattaataaacaaagaaaaagaatctacattgaaggagtggaatacaaaaagaaaacaaggctgggcacagtggctcacgcctgtaatcccagcactttgggaggctgaggcggggagggtgcctgagctcaggagttcgcaactagcctggggaacgcggtgaaaccccatctctactaaaatacaaaaaattagctgggcatggtggcgtgtgcctgtagtcccagctactccggaggctgaggcaggagaattgcttgaacccgggaggcggaggttgcagtgagccgagatcacgccattgcactccagcctgggcgacagagcaagactccgtctcaaaaaaaaaaaaaaaaaaaaaaaaaaaaaaaagaaaagaaaaaagaaaataaaattaaatagggcaagtgacttataaactgtcaaataatagaatcatatgtaaaaatacagttttcctgtaatcccagcactttgggaggctgagatgggtggatcacttgaggtcaggagttcaagacccgctggccaataaagcaaaaccctatctctactaaaaatacaaaaattagccaggcatggtggtgggcgcctgtaatctcagccactagggaggctgagacacaagaattgcttgaacccgagaggcggaggttgcagtgaacctagatcacaacactgcactccagcctgggtgacgaagcgagactctgtctcaaaatatacatatatatatatataatatttaatacatatatacatttatatataatatatattatatttaatacatatatattaaatatatatggccatatatttgtgtgtacatatatgtagccctatgtataatagagtatattatagttttccataattctataattctgaataaatctgtatcttgcaaaaaataaaaataaagcatacatacaaaactgtcacattataacagtatcaacatgaatttagatatgctgacacagaggcattaataaggagagtgggctgatacacatggatttatagcataacagcttaggtaatgtctcttatttcacatttggtggagtgatactggcaggactgaatggatagaaagtaacagatggtattcaatgtgaaaaatccctttgaatgcctcaaggactattgggtcacaggaacaagctacagcttttgtcatatagttgtagtgctatactgtctcatctcctaaaacttggttccacatttcaaaatacaaaaattttgccaatacatgtaaaaatattatttttaaaatgtccaatttgcttcctatttttaattctttcataaagtaaactacaaaaagtaaaactaaaaaaaaaatattttatggtggctcatgcctgcaattctagcactttgggaggccaaggaagggggatcacttgaggccaagagtttgagacctgcctgggcaacacagcaaaaccctgtccctacaaaaaattaaaaaaaaaaaaaacaagttgtcaggcgtggtggtatgcacctatagtcccagctactcgggaggctgaagcaggaggatcaattaagcccaggggttcagggccccagtgagctatgattgtgctactacactctagcttgggtgacacagtaagaccctgtttctaaaaataaataaataaattcttttctagatgagatgaatagaacacggtaaaaaagcagtgtcagggagatgaatttaaagtagaagaatgccacactagagtaaaactataaagccagtattacagccgactgatcagttaatttacactatcagcaaatgcttggtgctaaaagaaatctgcaacatcatttatcctagtcctctgagttatagttaaggaggttgaggcccagaaaaagaagttgtttaatttgttatatattcacaaattgaaatctgttttttaaaacttctccatgtataaaatattattagatttaaaacaactaatgttgaaatgtattgctccacttaatactaaactcatgatttgcttcacagaatgtacaaataactaaaatcccattcctcttccaagacaacacccacactcacacatacacatacaatctctaaagttttggggggttgttgctatgttttcttgttactttatgtatgcctttttaaaacaaaccaggagaaaagtcctatccaaatttctactatatttcattcagtagttttattgtgtaaataaaactgcttaccagaaataaagattatttatgtttataaaacttcaaagaatcattctgctagacattaaagatattatagtttacttttcttaatgaaaggtcagtgaagggacaggataaaaggaatttgttttcctttggtaactgattttttttccttcaatgtaacttatgtagatattaggtgatggaatagttgaggccacagaagagtacaaattgagggaatctaattttctcctatttgtctgcaatatttaatcaagtacaacggggattttgtcattcaattaataattcattcatttaagaaatatttacttggggaagtacaaagtggtagagatagagaaagactcaagaaactcaaattcagtggttgaaaaagacaaataaactaaccattttttaaaatccaattggatcctggtttgaatataagcctttttgtttcctcccccaaaatctaatgtattcagcaaaggtgtaaatgtgttaactaaggtgtttataaacaacaataaaatatttctctctcactcacccacattaacattttataaacacattttctgatatctacatcctatgaatttgtgtttaactaattcacacttcaaacagcaattacacacacacatatgcctgcctcttcagagaatcattttagattggatttagattgagaagggatcttagagatctagggttcaatggtctcattttacagaggagaaagatgaagtccagatagattggcatttgcccgaggtaaccatttagaggctgatatttaggattctatatagaactataattattctgattcaattttatagtttgttcagtttttccaaagaaaatacacacccgcaaattcccctttctcaaatcaggaactcttgctatattaaacccagaaggcatggctcatcaagtgaaccacatggatcagctgtccacctccttaactgcgccgtctcttcttcgtgcctgatgtccccaggccacccaggccaagatatagaagaaaagccaaaaaactactttactgaagccagcataggttttcaaaatttgcctcatatgtctaaagttaaaatatcaaaacaaacctcttattaaaaatcaaaatggtcaattttatctaaaattttttaatattttcaaaagtctaaagaaagaaaccactgcttccccctttaaaaagaattctgctttcagctgatacagaaaaatcaactaatgtggatggcaagatctgagaactatttagggaacttcggcctgtccatggactaatagtcacacttatttatgaaaatgcgtatttctgtatttttaacttgttaatgacatcattgggcatatggatttgaattggtgctcaagtgaaaacttctactgctcctactttggagtttgtgctcaaatgaaaacatctagtgcttgtgatcataatacacatgaatttttcaaaaaatctttaaaatattttagaattggaagagactggagaaaatgactggttgcaaaaaaaaaaagaagaagaacacaagctttgtagtcagtattttggctcttctggtgggtagttttgcagggttagaaggtcacttttatctctcccatcttgctctatatggtggggataataacaacgctgggttgttttaagaattgttaccaaccagtaaaatatctagcacataatgggtactcataagttggagctattgttatttactctagttctaaattcccatctgacgatgtgtttgaagaaagtgcagcagcaagggaatgaaaacgaactaaagtttgtttcttagcaattgagtgccaggcacataacgaacacaagtcaaatggcagcagcagtttctttcattgaccacttagcatatgccagcaatttactagatgctttaacacattatcttatttattaatcttcccaaatgccctcatgaggtaggacttatcacttcattacacagaagaggaatcagagactcagagagatcaagtaactgtccccaaggtcacacagctaacaagcagcagagccagaactggtaagaaaggcagaagaaatgagcagaggctgccctaaagccaacctgtaaacaaagcagggaagctcagaagcaactagaagataagtgcaacagacatgtcttcccactgtgagctccttaagaactaggctaggtctcattaaaggatggaagcccagactctgggacaattccaggaacacagtgagtgctgaacagatgtatgtgtattataataaattggaatgcaataagcatttgggcaataaggaatcacatttgctctaagcaaagtgtttgcgataacagcaaatgtaaaaggtagaagagtagtaaggatattcatgcttaaggacaacagttactgattaaaatattttataaatctattgtctgataatgacaattgtgttcacagatttttcctcaattatattattatataaagatttcaatcactgagtgctatcatcttaaaatgtgaaggactatgatgaggatacatacacactatacacacagacacacatatacacacacatatatagggaatagcttaaaatgtattctattgtatatgctatatggaaaaaatctacatgaaagaaaattctctatgaacgttgtaaaaataacccaacagcttagttttctttcattcaaataatacctatgacttaaagtcatgataaaaatcaattcacaatttattaagttagatatgtgcaactacatttatacaaataaaacctcggtaatttgatagcttactattttagggggaatagggactattatgaaaacaaagagaaccttagtctatcagaattttcaaaaagacaaacaaaaacatgggtcaaactaaaattctccataggaacaacctacatacagacacatccagtgactaaattgtgtttatgtatttcttaagcaatggatggagttcattttgacaatttgtttactaagaattgcaccagaaaactgcctattcattttctttctgtttggcaaacaaagcatgacacatagcaatataaaagaaaaatataatcctgggatgcatttgcaatcatcacagagaactgccctaaattgtcttaagcctgtggcattggctttcagaagaacatttaaacactgccacatgctgttcatctgtgtgtcctgcagtctgagagttccaggtccccacttggcctcaatagaaggttgaatcacaagtactgtcaggcttataaagctcttaacttctcaaaaccaccaaatggtcttgaaaaagagaagtataacaatcttaagaatctaatggtaatctctcattaagattttatatagtacacaattgtagtcatgacaaagcacagtctccatgagcacactgcttcctagtaaaggagcagagaccctaccattaagattttatatataatgcactaaatttactaatgtgtttgaattttttcttttatgaatttcgtaacattccgtctttattaatgctaattctacattgtaccacatagaagcctggttctttaaatatattagttcaagtctacctctatgtacgctaaagaaacatatacccacctcgtctaaaaactagaaaaacatccagatgcctataatatacttcaaggtagaaatcatgctttattcagttttgtcttttctgtgactggtaagagaagagatcctaagaaaatatttattgaaaaaataaatggatacataaatgttttaagcagagttcacaatttctaaagaatgaacaccacatcctgaaagaaactaccatttacttttagtttcctttttttataaaaatatatatggaaagattcaaaattagttgtcagttttacatacttcgcccacaatgagcaacatcaccaaccaaaagaaaaaaggcactgaatcattgttgaaatcattgttgattttaattagtttgatccaaaaaaaaaaagctgaacttgggcatgttattctatgttcttatttgaagtccttaattttaacatttgttgtataaaacattccaattgaaaacatataaatagtaaatggaaaaaatcttacatgtatgcagcgtaaatagcattaactaactttttgattcatttattcattcactcaaatatttaaagtatgtaatgtgcttagagaagatcaagtcgtggaggggaaaaatattgactgattgcagtttaaacttatgatcactaatttgaattgagtcttagtgctgcctagctatcctactatattctactcaattcacccccactacatgaccacagaacacttcccctctctctacaaatcttcaacgtcttcagcccctcttcaatctcagctgatgatcttgcttcttgtttctctgggaaaacaaatcaagcagaagaggacttccacaggccctcacctccaaaagtatcatctatctgtgttgatgtgctctgccctcctttgtgtattattttgggagaactgtctggttcccatctgaggcccatcctctgtctcttattcaagaccatgacttctgtaactgttcaatcttgctcctacataatcaattttcccctttctactagattgtttccatcagcacctaaacatattataatgtatcctatcttaaaaatacaatacaatacaataaaaacttgatccaacctcatcttctaacagcctaattatttgccctgcttcacagaaaagctcatctaaaaaattgtctattccgtgccattctcaataggagtgatatcactccagaaggtcaaaaattaattctttcaggcaaaaattacttgctctttgtatatgtaaggcatagatatatatatacaatacataacaaaagtatacctgtgatactggaatttcatggagaggggaggattagaaaaaaatgtctaagaaagctctttaaggaggtgatcatgaaaaagtgagaaacactggtctaaacacactgtctcggtgtcctcccttcccatttgtttcttgagccttctccaatctggctttcattcccagcataccatacaaactgctattgtcaatgtcacctttatcctctgacatgatttcagtgtttgtctcctccaaatgtcatgttgaaatgtgatcctcggtgttgaaggtgggcctagtgggaggtgtttggtcatgggggcggatctctcatgagtgccttggtgccttccctatgtaatgagctcacatgacagctggttgtttaaaagaacctggcatctctctcttgttccctctctcctcatgtgatgctccagttcccccttcacgcttcaccatgactaaaagcttcctgaagcctcaccagaagctgagcagctgctggtgccatgcttgtatagcccgcagaactgttagccaaaatatatctcttccagcttcaagtatttctttacagcaacgtgaaatggactgacacaccctccacattgcgaaatccaatgggcaactcttagatgaaactatagtcagtatttggtacagctgatgacttcctccttcttcaaacactttcttggcctatgggacaacatacatgtttggttttccccctcactcactggcatctccctctcagtctttcttggggttcctcttaatcttctagtttccaaacattgcagtttctctgggttcaatcttggacctcatccagttccatggctttaaatactatttctctactgatgattttcaaatatatctctccagctcagacattgctcctgaaaccttctatattcaactgcataagtattcccacttgaatctctattaagcaactcaaacccaatccaagaccaaatttctcttcttgattcccagttcactacctgcctcacaaacctacttctccctcagttttctccctttggtagaagacaactctgtttttgcaattattcaatcccaaaacagtgatttcactctggaaaccactgtcacagtccatatctatacatcagcaaatcctggcagccatacttttgaaatcaagtgtctgtagcaacctgaaccctttagaattgatgcaaaaatgagggatccttgtacatctggattgcacctactgctcaatgtaccaccagtattgctgtagtccatgccaccatcatttctggtctctgcattgacaacatcagttcatctggtcatctcagccctcttacagtctaacttccaaaacaacagcaaggtaaattcataatccctaaatctaagtcacataaggtctttcctgaaatggcttcccatctgatggagagtaaaatccaatgtctctatcacagttcacaaagccctatttaattgagcctcctgcttcctctctgctctcatcttctgccactgtccctttcatatacactgcatgacagccacactggctgccttataaaacttctcactgcttggggccttcctacttgttccaaggaacttctatttggatatccctccagagattctcttggtttacactttcactaccttcaggtgtctactgtttaaaaatcaccttgtcacagacctgctcacactatatacaagagtattccttgtcattttctatttctcctatcttgttttctcttccctcagcatgtaccatcatttcacatagatattcacttatttttcctccaccccctggatcaaatactatacaatattatgcctccttccactagaatagaagttccttggagcttttaatgtttggttcactgctgtacccagggtgtctagaacagtgtctagcacatagtagatgttcaatatctgtaaaatgaaaaaaaaatgaatttgacatcttaataaaagatgacaagtgccatttaaaaataaaactgaattttaatttctcttcttggagtaaaatctcatattttcatatgcatttggcaagtaaaattataagatgcaaaaagtatctaaaaagtcacagaaatagaaagcaaattctgcttcagatatgatgatttcctttggctatttcatgtagcaaattttaggagagatcaacatttaaatatcttactcaaaccaacagagacttctagactagtaaatactacaaaagtgttctgtgctggctactcaaatacattttagattttctctcattattttctagacataaacattcaagtcagaatgaaaaaatgtcagactttggaaacaggacttcagaagaatgacggtcagaaatgtccagtcagtgtataaacaagtctcataaatctgaggcaatataatacaaaactacttatataagatacatttgtgaagaaaaaaaacaaatttggactaaagcttatccagtgaagaatgccagtattcctcccattcttttttttatccttcccttcctctcttttcactaatatttagaattccctactttaaaattagtagttgattgtggtaatactttcttatttggatttagcacattatatttgaatcttcagagatttctgccagaaagctaaaatcttacttctcaaatttcttctcttttgaaaatgcctttgccagctcagatggggaaaagtttaattcaattcagttgatgactcagttggtgataatgacgcaattccataaattatagctctctgctctttcatctcatccccatctctagtatggacatttccttttaaagcttttctgttatcgaagaactctaaatgaaaaatagggctccaagttctaaaagaagcacacagtcagtaaggcagcattaagggggaaactttccttctgttagggtagcaacctggtggcctagtttaaaacatcacacatctactgacagcatgtgtatgagaacaaaactatgaaaatatttacatcatgatgcgtttatatcaagcatggagagattgcacacattggtaaaggataaattgctaggagaggggcaaaaaggtataccgctccaattactaaagcctggagaagatttggattccataattggttctaccactcaacagctagagagccttaagcaagttaacataatttctcactttcctcctctataaaatgggaataataatatttctcatgaagtggttgtgaagggtaaaaattataatttaggaaagtgcttaacataagtattcacaaaattgtgttgatattggaattatcatcatcttccagctatcctcaactttatgttgttattttttttctgacacaactaattagttccccagagggacacttaagtaggtaaactccctctgtcctgccaggagcagaagtgagtaataactgcaataacagaagtgccagatcaccctaaactccaagatgatggaagtctccgctgtttctactgatgtccccatttgtggaaggtggcagagaggtgaagattcagttgggcagcctctcaggcacttagagaaagaaagattaagtagaacagactcccaatctgccatttagcaaataataaatttaaaaagacaagagaattaggaaataataaatataaaaatacaagaacatgataaaatatcaaaggtgacaatatttaattaatacattaaaaatgtaaggctaataactgttttttctaaaattaagatcccagtttataagtttgcaggcagcccaacagaccagctcgtgtcagaagtttagaaactgaatatttccccctcctatggagatggtctgctgaaaaatgcaatgaagcatactatttgatgaaaacaggactttcgttctttgtgcttttaataaaactcttttcagcaaaatgtcaaggaaaaaatcaagaattagaaacgtcttttagtaaaagtatttcgttctcatttttccatcaagaattatggaaaattctagaagttatagaaaggaagttgaaggtattcattatgggtagtattttatcattatattctacagtgcataataaattttgcatctttgtagtataacttattcatgttttacgtgtcagtttaagcatatgttaaggttaacagcctttagaacaacatttctcaaagtcttaagagtgttttctttcttccaatctaattagataaagttatttaccacctcaatgtatccagccaggttttgaaagatagattcagtatttttgatgaactaagacccctgtcatttgttcaacagatgttcccctccaaggctcaccataatctgccccaaatccatctctctggttttatcttctaaaattccccaccataaagcctagctcctaccaaatcagtccattttcagcctcccaaatataaaatgaacatttctatttcaaactttatgataagaccattcttctctctaaagcactctctccctttcccactgaatgtcctccaagacgttttcagattgtttcactcattcattcattcattcattcaatgcagactgagagcctacatatacgaggcactcacaaaggaatcctgggaaaacaggaacaggtaagtccaagcaagtacctgtttgagtggactctatattctaccagaaaagacacacattgcacaatggattaaactgttaattaattaaagttgtgataagtgttaaaaatacaagtcaccgaaaactacgagcacatgtaatgggaaaaatggcctggtcttgggggtcagaaagactttttttttcttgtattttttattaatatatcatagttttacatatttttagagtacatgtgatattttgatacatgtataaatatgtgatgatcaaatcaggataactggaatacctatcacttcaaatatttatcttttctttgtgttggttacattataattcttctattaggaagactttcttgaggaagtggttttgagctgaggttgaaggatgaaaaagggcctaaagtagggcagagggaggtcaataaacaaatctgcttgatggttattataaaattaagatatattagtaaagatatggcaaggaaattcttgccttccaggcattaaaacttattgcaacagtatttctcccaattactcttgctttctgtaaagctggggacaaaaaaaaaacccagtaatgatcttacatttaaagaagccaccaggaaaaggtgttagccaacagctctcaaaagatctgggaaacgatcagtcaaaactggtcccactaccctgagccccactaccctgagccccacagcccaggcaatataggaaaaatattcaaacagatgtgaaagcttggccctacagagagtgcaatgtttctggagagctttatcttccaaaccccgtaagcagagagtagtagctcctccttaggagcctactggagaatgattcagaagcaaactctgggagggagctcccaggaggagtaacagagacctggttccctggctatgtacttgctgaactgttgaacccatggggactagggcaaagctctgctggtagggctgcctataaggaggggactgttaacagcaacagaaaggttcataggaggctaaacactacccactggccaaagaaacacaccacacatatggtctacatatagaccatcatggaggaacaggcaagagcagccaattgcccctccctaccaccaagaagtcagtcttagaggcaatcaatggttctgtaagcttatagtttgtagatgttcagagataacacacacacacacacacacacacacacacacatacacacacagacccataatccactctgctacaactctctagcaccacaggtgccacagacaggtctagctggagtttagggtagagagaatgagctccaaactgagaccgaagtttaaacataaatacagcgagtcttcaaaaccaaagtgagactgttctaatggccaaaagtgaccagaaagttatagcaaaggaccaagatgtcattaaggaatcctctctagatagacatggagttcaacatagagacgttgagggcagttctgggaaaaaataaagctgtctcatgtttacaggtcaaatagttcagactccttaaaaatgacttaaaaccacaaattgattataatgaaaacaatgacgatattgcaacacaagtaaataaatggaacagaacagatatccagagacagactcaagtatatatggaatttaacatacggcaaatgaggaatttcaatttagtgggcaaaaaaataatctcttattaaataaatggtgctgatataatggatttcactctggaaagacaaaaaacaaagctagatacctttctcatattttatataaacatatattccatataaagattttaatgtaaaggataaaaattaaaaatattaggaatataattcagaatacttatatgactttagagtgagggagataatccttagcaatcaggaagtcaagtatctattaaagaaaaagacacacttgactaaataaaaatcttaagaaattattatggcaaatgaaataataaacaaaagcaaaagataaataaatgctagtctaggaaatatatgtagtactatattacaaatattgatatccttcatgtgtgaaatgctcataaaaaacaaataatccactagaaaagtaagcataggacatgactgggacatttcacagaagaaaaactctaaatgaccaataagcttatgaaaagaggctcaattttacttttggtcaagggaaatgcaaattaatgcaagagcaatcaacctgtttttacttatcactttggcagaaatgttaagattgataaaaatttaaaatatccggtcctgatgagtatataggcaaacaggcattgtcaaacgtaagagtgagaatcatgacaaactttttggaaggtaatatggcaatacttattataacatacaggttttttgagccagaaatttcactttggggatcttatcacccaatatagcattaagagcatcagtttataagaatatgtaaacaaggatgtttttcaaggcatagcatttaatagagaaaaaaactggaaaccacatgaaagtccatagataaacaagagatgaaagactaaattccagtactcccaaactaaaaaactttatgcagctgttaaataaaaataaatcagatgtttatctaaaataatgttgagtaaataagcaaagtgcaaaacaataattttagaaggcacgcacagtcatccaaagctttatatggttggaacaaagtgtggaagggcactcactgaactgttaacatcagttagctctggggaatggaaaggagggcagggccaggaataaataggtttgtaaggaataagaagagaaccatgaatgaaatgacaatttgttgggcattctatgaatagactgtgtgggaaggaataaagagatacttgataaaaccagcaaaaatttaaaaatagaaaaaagtaaatagtaggcaccaatgaaaaggataaaaacaacatagtacttaccccaataaatgtaaaagggttgaactcatctatcaaaagaaaaaaataaatagtagataccaacggaaaagataacaacacagcagttatctcaataaatataaaagggttaaactctcctattgaaagaaagagatttttcatgctggatttaaaaactcaggtaggtatattgttctctggaaacatctaaaaccaagtaaccataaatcaacaaaagtgatcttattcacaatctccataaatattataaaatatttcttaacatgcctaataagtaatgtgtaagatcttatgataaaagctataaaattttactgaggacattaaaaatacctaaataagtggagaaatgtttcattttcttagatgagaagatgatctattataaagatgccaattcttcctaaactaatgcagtgtaattgagtgtaattcaaatcaatattccaacaggagtttttaatgaaacctgattctaaagtacactcagagaaataaaaaatagattagctaagaaaaaacaggacaaaaatcaagcgggctttattctactctacatcaacataactgtttccataggaaaagagtttagtgaaaagaatctttatttcatattggcagtattaaagccacactttgttatactgtaaatctcctaaatgcccatcaaactggtttactacattaaggtaaatcaaaagacgagagcactacacagtaaaaataatgatgcacatgaatattcactggcactgaaaagatactcttaatatactgtaatatagttttgaaaaatccactgaacaatttcacatatcttaagtatagcattaaggtccaagttgatgattagatagctgaagccagagaatgtagccagaggttggaaagaacagagtgacaggaggatgtgagaagctttgttttgcgtaccagagcattatgtgaggaaaggagtgggatggtatacaggtcaccactgagaaagcagttattgagtatccctggaaagttagaaaggtacccccaagatctttattttaatagttcatttaaaaacctagcatctataaatgtactggaactttcagaaactattatactggatgaacaagtgctataatttttaaatgtaagcaaaattattcagtcaaataatgtcttattaattgaaaacttttctacattgaaataaagtagcatttccttaatttgtggttgtattttagaattttaaaaacaattccatgttctcctaaattataattaaacatacatatgcatatctgttctatatctgcatctattggcattgtagatctgtgaagctctatatttctagataaagaaattttatttctgttattcatatattcacatatggatgtgatcctttggttattagagtttgccttcttgagatcttctccgcttttattacatctttgctatcacacagcaactagaaattaaaaaatttacaaggataaattatttagggaaaacaaactcctttccccatcctccaatctaggaaagagaagctcaacattgtgttttgaaaggttgtgatgactgcaaatacacacacacacacacacacacacacacacatgcacacacacacatgagaaagtaaagcatctttctcttgcaggatcttaaggtggattaaactggtgaatccctgaaaatcagagggtggggggtggagatgagtgctataactagaagtaaaactaggaggagagattaggaattcctgaatctaatgtttaagggtcaggggtttgaggaatttctgtgcatggtagagaggaagatcaagtacacatggaagagctatgcataacagtggttaagagtacaagctctggagtcattttactgaggttcacatctcagtttcaccaagaattgagacaataataatgcctagcattactttgaggattaagtgatataatctttgtaataagaatatagagaaagtagcactattatagaatcagaaagtaaatcataagagggtcacaatatgatacatgaggtttctctattctcccagctgggaggaagtttaataaatgtaataaataattgccaaatgaaaaaacaattacatctgcttcttccataagaagcaaaatagagagagttggatgacagaaaatccagaccactctataatgtaaagggaattctttcacataagatatgatacttatgttaatcctaaaggctacatatgattagaaagagagagaaagagaatgagaatgagaagaaaaacacaggaagctacagacgtggctgttcatagtctgtacaaatgtgaaacatgtagtacattcctaattctgtcactcattaatcaagcactttttggtaagttatgtaattctaatgggcctaaatttatttccctgtgatatgcagttttgtgaatattatagttatagtgttattctatgtttctgtcattttcacagtcctctctagtttagattctaaggggaactacaatatatatttcacacactagatggcaatatatggctttgtaagtggatgtctttttcacagaagcctaagacgtctaataatcaaataagagctgatttttctccagaaaacacagagagaagggtagacattaaccaattcttcatactgaggtcatgttttaatccctttgatttgacccacagatgttaaaggatcttgtggggacattctagtttaagtctttagtgccagagagaattatttcataacaatgaattaaacacaaaatgatttccatgggggtccaattctgaattgagtcagctcaatataacatccaaagaccctcatcctcagtcaaatataccaagtcaattattcttaaactttttcatcataaagagcctacatatggcacaatactcctccactaaaaaaaaaggaaagaagatctatttcttttcagcatgatacatttttttaaaacagtgtcaacgttatctttctttttttttttttttttttttgagagggagtctcgctctgtcaccaggctggagtgcagtggcgtgatcttggctcactgcaacctccgcctcccaggttcaagcgattctcctgcctcagcctcctgagtagctgggactacaggcgcactccaccacacccagctaatttttgtatttttggtagagatgggtttcatcatgttggccaggatggtctcgatctcttgacctcgtgatccgcccacctcagactcccaaagtgttgggattacaggcagaagccaccgcgcccggccaatatcattttttataataagagtaaactattcttatttttaaagttatgattattcaaaaaatcgtaaagaagaaaatgaaaatcatatctgagcaatagccaatgttaatgtttgtcaaattatttctgattcatgaaaaaatatataaatacatactttaatcttctttccaagttaaaaatatttataaatatttctgttaataaatatattattatattagtggtcactaccattctatttttcatgggtatatatttacaaaatgtacacaggaagtgttctgagaacacataccttaactgaaaagtctggtcttgccccacaacactatttttcacaaaattgacagaattggtcccatttaaagatgagtaatgattaacaagagacatatgcagagaaaaggagaaagacaacagaacagaaaagaacagaacctaagaaatgagctgatgaaaaatacatatcagaaaaattttgccaggaagcaaattagttcaacaaacactcgggcattagttcagtaacagtaaaagaatacaggacctctttgaaacaatacctcaaggaaggggccaaaaggaactcttgaaaattacatggatgacatggagaaaaggctagaaaaaaagtaatgcaaagatcaaagttgaaagtgagttaaaagaaaacagaagctttgagagggagatactttaagcttttgtagatactctgagatcataataaatgaaacaaataaatcttccaataagtattagaaggaaacttacctaaataagagaagagctgaatgttcaaggcaaaagtggacaacatagcccatgaaaaatgaacacaaaactagtaacaataagatatatacttatgaaattactgggctcaaagataaaaaatataaaagagatggctctaaagtaaaatatccctgaaaggtttagaggaaaaagcatacaccagaaaaaagaaaataaaagagagaacatttcatttataaaagtttatttgaaagcaaaataaaattaaaatgaaactaaagagagaactttttaagtcaaaggatataattttaatgagggtctagtacaaatcaaataaaatcataaagcaaaaattgccacaaaaaaacccaggaaagacagaaagaaaagtaataatagtaggtgagttaagttatctttctcagccaaacacagctcaagtgcacacacaaaatataagatgtaaaaagagctaaataaaattattaattagcaagcccttaaacacatttaggagacagtctatgacacggtgttgctttagatgtcactaatacaaatattgagaaatactttcaaaatgtaatgttaaaggatctctcttgatatacaaaactatgcagtttttaaatattggagtatgtaatttacagcacaaatgaatgtcctgactgatggctacactgtatttttataaaatgttatagtatgttattaaaacaatctcaaaatcaatccaattattgccaacctccatggcaataaattatcctactttaaatgtcattggcaacaaactagaagtagattcatgaagagatcattcaaattagtctcccactttgcctacaggcatctaataaatattccaatttcttctatattattatcacacactgtactagaaaataagctatattatttctgcatagtagaaatgatactcaaggaaaaaaatgctttcaaaatttaacagcagctatacccttcctcagaaaacaatttcttctatagttctaaatctaagatctataaaacatatttattaccagttttctttctattagtggcataaaaagccatttctctatcaaaaccaaggtcaatgttagctgtgcaacaaagtcaaaagctacaggcatatcaatacccactgccatcccacagccctgaagccttgtccaccacgaccagactctgttatagctcatgggcttcaggaaagatgaggtaccctctacaattcaatgacttgacgggccagggtcagtgagccatgatgaaagcaggagaaaataagtgaaatctgtgcagatactgacaaaacagagccacaaaaaagtaagaacatgccatattttgttttctgttcctgcattaatttgctaaggatgagggcctccagctccatcatgaccttttatctggaatccaggtaatagggaaatctatagggacagatagtagattaatgattgcttagggctgggggcagggatggggatggagggatgggggtgatagctaaaggggacagaatttctttttgaggtgataaaaaattccaaaatttactaattacagacattgataatggttgcctatatcagttattatactaaaaaccactgaattgtacattttagataggtgaattgtatggtatgtgacttataatcttaaagctatttttttgtgtgtgtcgttgttgttttgttttgttttaagaggtgtgtcttaggggttgaggaagaagtcagggaagaggtgagccaagaggtcccaagcagggaagagcataagacagagactcaagagtaatccaagatgagatgtcgcatgggttcatataatcaatatacgcaaagcaaaggtgcaaatgtgaggaaaagagatacaaattgtttggacaggctgatgctttatgacagcagttctcaaccctggctgcacagtagcattacttgtttacaaggcgagtcactttttgaagatacattcgttgctctgttccagaaacaagtagatttgctaaggcacggtattaataataattctcacagtgcggctttgaactgaatcttcagcatcacctagaaacttgtaaaaaatgcaaattgtccatgcatacctcgatacaaccagaaactcagactgtggcccagtaatctgtgttttaacaagtcttccaggtgattcagatgcaggcataaaaacaaaccaaaacaatggcaacaaaaatccactagagacagggtgaacattctgcacccagacccttgatgtgaacataatatggtgtacccttctagttctttttgtcaggcttgggaatagctattaccaagcaatttttctaagaaacttttgttttaacctttgttaaggaaagcaaaacccaggttttagctatattgttcacagacctgaaaaggaactgaaacagatgttttagatatttaaggttttaacaggaaagtattccaatttaaaaaccaagatgtcacttttttttttttgtaacagcaaagttgtgagaaatcggaagttctctcaaagatttaatatttcaattctagggcatatagatattagattggacttcccagacacactggatgaaggagagagacagcagctggagtaccaaaaaggatgtcaattcacattcctggcatgattcaggacacccttcttacctggtaaatagaaattcatacagagcaacatactatttgaaaataagtaagttgataaaaagtaaatgaatcaaaatgaacatatagaactaattaagttaatgaaagtcaaaggaatatgtaaatacaattttcagatctgaacttaagcataaacaactagtattttaaaaaataaggtctactgcaaaacaagcaatggggaaaagactccctatttaataagtggtgttgggacaactggctagccagatgaacaagattgacacatgttcacctacgtaacaaaccttcacatgtacctccaaacctaaaataaaagctaaaaaaataaaaaataaaaaataaagattatatcatagtattctagcaccttgacaaaaaaagaataaacaaacaagtctgaatagattcctttaagaaatggaatctgtaatttaaaattttaccacaaagaaaactctaggcctaaatggttttaccagtgaattcttctaaacatttaggaaagaaataacaccaaacttgtattaaaatgcttcccctgaacagaaacaggaaaaatttcccaaataattctatgaggcctacatacctccatgtccaacaactggagaaattaatacaagaaaaaatactacagctcaatcactctcatggacatgaatgcaaaaatcctaaacaacatattagcaagccaaattcagatttacataaaaagcattaaaaaataaggtccattgtcaatatagagtttttctttctttcttcatacaaatccatatttaatgaaaatagaatatgaatagaataagaaaaaagtctattatgggattctattaatgagaattttacagagaatgtgaagaagtaatacggaccagtgaagtttttccttaggtcttttggaaacacattcattcagttggtcagttggtcattcactcaattcgcaaatattaaagaacacctatgcagtaaacactcattgttcttgattactcagcacacaagttctcttcatggcagtacctatatttattttgaggtgttactttgtcccattgattacatgcaatgcaataggattataatccaagatgctgcaattccctagccatgaggtgggaataagacccatgtcaggtcaataggatgctctcttgaaatttaagtcttgggcagaggcacaatgatactgatggggcacatcttttctaaaggtcatattctcaccagattgttgccagctagggctttttatataattcttgttccacggggttggggaattaaaaacagggcacttcagtcagaagtttcaaggtttcaattatgcaaggtaagtaaatcctggagatcccctgtatagcctagcaactatagttaataatatcatattgtatacttaaaaaattgttaaaatagtacatctaatatgttgtatattcttttttttttttttttttttggtttgttttttttttttgacacaaggtcttgctctgtcacccaggctagagggcagtggcacagtcagggcctactgcagccttgacttcccaggcttaggcaattccccgcctcagccttttgagtaactgggattacaggaacataccactatgctttgctactttatttttttttgtagagatgaggtcttgctatatttcccaggctgacctcgaacacctgggctcaagcaaccctcctgcctcaccctcccaaagtgctgggattataggcatgagctaccacacctggcctatgttaagcattcttattacaaaagaaaaaaataacaaataaaggggaaaaagcttttggaggtgatgtggatatgtttatggcatagactgtggtaatggttttaagaatgtatacttatctccaaattcatcacactgtatacagtatgtacagcttttcatatgtcaatcatactcaaagtgatttaataaaagaggactcatgcaagggctaaaagatgagaccacatgctctctaagactcccttcaattctgagtttctatgattaaaatgaacaccgtcagctaggattgtagtatcagtaaggaaaactggcctgatgaaacaaaagctaactgagcaagtgcaacttcttggagaaatgtatcctccctgccccagtacttaatacctttattccctttttgtttctcatatctgaattccttcctactacttagtacaggaattttagctttcagactcctcacatgtgccttttgctgacattacttccctgttcacctctggatctcagagttgacttagaataaacccaaagtctcctgttgttcacatgtatactagaaattctaatttggccactggcttactatcttctccttcccactatccccagcatttctggcagtaagagtgcaaattctaccactgccatcccacctgcactgagttacatctcatctgtgctgagtcaaagtggcaggaaaaagatgtctgtggatttatcacaagtttctggtggcagtgcaccaggaaccctcaggaatcacgaagaaaatcttaggtatctacctaagaaaatcttagctatccacctcccctactcccacctctgagagtaaatagctgctgtcaactaggaaagatataagcatgtaaatgacatttctaaattggctatttgtagtttagagtctactttggggaaagataggaaatcaaaccctctgcacatactttccccaccacatgttttatatcaaaaagaaattaaacaaaggttactatctaaggtaaagtgaataatgctaaaccaactgcagtatccaaaggcttagaaaggataaaaattttctttgacttttagttcctttattaaaatttggctcttctggcataatttcagcttcttcagcaaaatttactcatcccctctcacccatcccttgtcatgcctctcgttcacaaaagagctagctagacaattgcctcagacagaagtaaacacaattagagagcaacccagagaacaagaacataggaaaggaggcaatccaagcaagtacttgtacataaaaatcttttctcaaaaatggccacaaaaactgctcttcctttaggcaaaatcatttcatatccatcaaaaatactgacgtgttgaagacatgggcaataagaaaagtgttcaacttttaaccagctttaaaaacattctatgggtttcaccttggcctagattaatatcatgacgacggccgtaagtatcagtttttaagacaggcaaatcaatagagtctatcacttgtcctttgcgaagagagttaaaccaaattcatgctttgtcaaaagaaatcccattccctgaggcaggtaaatggcaaaagcagactcacaggtggtgatgtcaccttgaagctgcagaatctcaggaactggcattgtgagaacaataagatcaaactgctcaggggagcctgtttgtttggatacttcccatttgtcatctcttaggttgatctgtgtcacacgatgtctgaagtagacttctgcacctgttccaaaagcaaaatcatgtccccattatcagaattgcatatatgaataaaggggatgtgagtagtcacaaactgaatccattcaagtgaacaaaatggccaagactgtcttctactgtcctccagctctcttcctttactttctttctaatttagtgggaattcatccctacctggcatccttggacttccctatcagtgcctgctctgaatcaaaaactactcctacaattagtgataaaaataaaaataataactatagctacttttcattaagcagctactatatgccagctgcttggtacacattatactaatttatctcacagacaaggaaatagattgagaaatagcatgccatgatttaaaactataaccatctgactctaaagctcatcatttttgcagaacaagtatacacttcagtaaacatgtgtgttagcaatgaaataagaagagcaatattctctattaaaggaattaatatttcccattaaaggacctgaaaaaggttctctgtaagggaaatgcaagttctcatcaatagatcaattgtcttcattaagaagaatcagaatttagaaacatactctagagtaccctcccataacattttccttcttagcacttaacacaaggatattttaataattatttctttaatattgtcttcccttttaatctgtaaggcccatgagctacaaattatacctgttttatttctatgtatagcatatagtatacatagcatagaatttattagttaagtatttatttaaaataatgaattatgaggccaggcacggtggctcacacctgtaatcccagcactttgggaggctgaagtgggtggatcacttgaggtcaggagtttgagaccagcctggccaacatggtgaaaccccatctctactaaaaatacaaaaactagctgggtatggtagtgcatgcctgcaatcccagctactaagcaggctaagacacgagaatcgcttgaactcgggaggcagaggttgcagtgagctgaaatcgcaccactaccctccagcctaggcaacataacaaataaaaagaatgaattatgaaccataaactgaaagaaagtacaattgggtcattaagtctccttagtaaactagtactcaccttccagttttcaaaaaattttgatttacaagcaaatctacttttattcagctttgtgtatagaaaaagaaagaaatgaagatggaatgagggaggaaaaaagcacactgaaagatcctgttcatctttacctgggaaatctcacgttcctagtcactaaaaatccagctaaagttcatcccaaagcttcctttctgtagccactccagctcagtgtgatccttcctctctatgatattcttcaaccatcactgcctttagtactaattttgacattgattcaaaatatctgcatgctttagttgtatcttatctatgtaataatactcaaggctccttcatgtcgggtcttcagatctcatacactttcatctctttcattgacccttaaataatgctacaccctagtaagcactccagtttttaaaaaatcaaatgtaaatgttagaagaaacatagttctagctagcccaagagatcaatctctgttcaagacagtgtgcatcattctgttcaaagattagagcaaggggcttgtaaacagtactccatcttgcctgagggcttttctaaggcccctgcttggggaaggtgcaaataatttgcactttcaacacatatccaccatctcctttattccaacaagggcagctctgcttcactctgtttttatttatttaggatgcctcaccctacttgcctcacttagtccatggccctgtcccagacctcagctaagttaactgattctacgttttctcataatattcctttgaagagaacaatatgctgttattgttggtggtatgagtgtgtgtttaaggggacttaagttcacagtcctagaaaattcttcatgccccagatgaacgccttgaaaatgtatcccaatggccacaaggtgttctgcaaagtatatatatatatatatatatatatatatatatatacacacacacacacacacacatattatatatatatactatatatatatgtgtgtgtatatatatatatatatatacacatatatatacaccaaggtgtatatgtatatgtgtgtgtgtgtgtgtatatatatatatgtcagtggttctctaagtatgaaccccagaccagcagcacctatgtactagaaaatgcacattcctgggccccaacccgaccatactgaataagaaactctgggaattgagcctcgcaatccatgtttaacaagctcccttagtcttgtcatgatgcgcgctaaagtatgagaaccactggggtaggtggacacgcccaaatcaaacaccactggcaaaaccacccaaaaagcagcatttatcaagaggtaggagaaatggtatagcctctcttattaaccagaaaggcttcctttccaactgcttggagcaaagtttttgggaaagtggcatttccttgtgaaagtaattaataactttcacaaagactatgtgtttaaatctataagctctgaaaaacccaattttaaaatggataaataaatagtctcaagagttatgtctgagcttagtaaatttgaccatgtccctctcttgcataaaacccttcaatggcttcccatcgcacttagagtataaaatctttaacattgcttacaaagccctgtataacctggccctgccttagtcttgagcatcatcttttaccattttctccctcactcactaccgtccagtcataatgatcttttattccttgaatgcactaacctcctcctactgcttcaaaacagttccaatttgatgtgtccactgcattgaactctcatcattcagctctcagcctaattccctcttgcccacctttcaggtacccatgaaaatatcagttcctcagggatgctttccctaacacatctcccccatcactcctctaaaacctactgggctaggtccttttattgtaagttctctcataatgctctcactctttcttcttaacatttatcatgcatcttttctttgtatgtataattagtttaatgtcttttcttcccactatactctacattaacagaggccaggatcatgtctcttattgacttttgtttccccagcacataatatttaattagaataaaatgatcttcagatagctataaagatatcagaagtctaagaaggtttaaacattttacaaaggcaaatgtgtttctgttatatatttattcaattttatccctggccttcctccattttaaggagaaaatccaagtttatgtttctcctatgatttcccacaaataggttttagtgagcagcagtcagaactgctcaggtgggacctgaagtgatgtgaaccatctctaactgactacacagcttgaagtaaatagaagaatgcttaacctggttttcatgccatcctctagcttctctaaaaaggacatcgttacggatgagtgccaggatcacctgctgggagaaattttgagacagaaccacccagactcacttcccctctatcaattttagaaagaaaataggcacaaaagtaaaaagagagagaataataaaagtaaatattacaatacagaagccatcctagctaatggcatctgccacctaaaccatttttttctaataaattgatcttgtcaattttgacaggttactttgcaaatgttgactttctggatcgctagccaatgtcctttttaggtagatgataaaataaaaacaaataaatgcagcaacagccctccctattggtaggacaagctaaataaaagctgctcactctgtgtcctggaagctaaattcatcttttttgaataatttagtaacatgggaccttattcaaaagcaaaaggacctggcccatcattttccatgtcataggcaggaaccatcaggtgaccaatttcccaggttgcataaagaactaaggtggtattactcttcaatatccacttccccctatgtcaggaattaactgatgaaagagggaaactaggggcacagggaactatgaggttgttctattgaaccatgtgtctactgacacgtagcaccaggtgggatgggtacaatcttcatactataggaaaataatcaataaggaaagagaaggctctacaaaatagatgttaaattggagagtatgagcacctctcattgccctccatgagagacttaatagaaaaaaacaacatgattaattgcaaaggcacttcagttctgttaccaactagccaagccaccttagacaaagtacctgagtctcattcttcgcattaacaaatagggatgatgattaactcccttgaaaatttactgtgagaattagaaactacatacgtaaagtacctcaggtagtattagataaatagtcagcacttaataactgatagctagaatcacttttgctattgtcaattctcaccccagcataatgacaactagtataaaaaaagaacaaaagaaaatcatgtttcactcactcaagaagattgtattaatggagaaggcaggcagtcagtgaaattgatgccaataaatacagctttctctgcaatgaggttaatgtgaacacatcggacaataaattaaaatagaacataaggtcaagaagaaagcatctatttcctttaccttttactatttgttctgggaaattggtctagttaaatattggctttaaaggtttgaacctattctaaagcatgcctgattaggcatatcccagacaaataattgccctgggagtctggtcccaatctgaatgaccactggttggtccatcagattgtggggttttaaactcaactagattccaaaatatagagtatttttgaaaatagttggcaatttgatttcttaaagtaaggaatatatgaaggtcagcttcattcaagtacaatattttttaaactaacatttttcaagagattactatgtgactggcttactacttgcttgaatttgagtgcattatatctttcattcctcacaacactttgtagcaagaacttccattacaatattctgtagtaagtaccctcatttttgcatttcattacgctcatttttttcaatgaaagaactgaggtacagattttaaactttcctaatattacatgaacagaaagggatggtaggacattaactggaatccaggtcattctgatttcagggactgtcttagcttatagtgtggaaaaaccaaaatgtttttgtggaccatttatagaatagaaaggttaaagggacttaaagaatgtttaaaagggatataattataaaattaaaaatattatagatagggtccaacaaatcctatagataatagatcggggtagaggagaatctcgaagtattacaagaataacattaaatagcattaaaataaacaaagaaaaatttatataaactcaagttaaatagaccatgaacttgatataaaataaatttttaacatttatatcactctacctactatgtaggaggtactattagtttctgagtgaggtacaaggaattaaaaataatctcttctctgaaaagcttaaaaagcaaaattggaagttaaaacgtatgtattcccccaaacacataacaaaataaggagatagatgcaatgtattcaaagatgtttctctgccaggacatcaactccatgaaggcaaggacattggttcttgtatcattagtacctagaacaatgtttggcattatggtaagtattcaatgaatgtttattgaacaaaaggatatgtgtatgtatgtatatatgcatgtgtaggggtgaaatttcagtaaaaatcaactgacaaaaggcatactaatatgagaaaaagcatacaaatttatttaatcatagttttgcatgacactgaaaccttcagactgaagacccaaagatacaggagtccatttttatgcttagattcaacaaagtatggacagctctgcagcaatatgattggacaaagggttatatctatggctaacaaactggtaaaacccaccaaggcctgtctgtctagattcttcttgtcctctctgtgcagcattctttctttatggttataggtcatgaccctctctggaactgttgtgagctacaatcaaacacggtaggtcagataatttctttatggccagtttttacaaaggaaggcaggggaaagctagagtgatagttttaggttttatggctggtttggggggaaaaggggttcttatttctacgacctgccttgggaaaagagattctattttctagggctagcctcagggatgaatgcaaggccagagataggagggcaggagaaggtcagagagagctacttctgagggctccattttgggatatcattttctaagctcctgcacatgcatgcatgcacgcatatcagttagtaagtacctgatgatttcaataggtatactcatccaacctgggtcaggggaaaatcatggtggaaatgagattttttaaagtgatatggccacactatatgaagctgatagtaacattctacaaaacgtccaatagtgtcaccatctgtgatggtcaattttatgtgtcaacttgacttggccataggatgcctacatatttggtcaaacactattctgggtgtttctatgagcacgtttttagaagagattaacatttattatcagtagatcaagtaatgcagattgccctccctaatgtgggtaggcctcatccaatcagttgaaggcctacataggacaaacgcattgatcctccttcacataaaggagaattcttcctgcctgaaagcctttgaactggctcatcagcttttttccagccttcagagtagaactgaaacattggctcttcctgagtcttgagcctgccagcctttggactagaagtataccaccagctttcctgggtgtctaccttgctggatcaccctgcagatcttgggacttaccaaccaacataatcatgtgagccaattccttataataaatctctctctttatccatactcacatatacacatgcatgcacacatacatacacacacataccctattggttctgtttctctggagtagtctaacataccatctatatactgaatctcgaatggagaaatggtctaagccagaatggtatttattatgttctcatgttgtttattcaatcttactgacctctctgatgcccagtgtcaaggattcttggggttctcaataagtaatatttgatgataaagatcaaaacagtaattatgctggaaatggcttataaaaaaattcttagcctatatcctttctcagttatctcaacttgggtacttaactgaattatgatttatcaagaagcttcattctcctttaaaaataatcatcaattatccaagaaaaattctattttcttttttaaaaggtccattttcaaaacgctcataaaatatataaggaacaaatgaaaatcctaatagaaaatgggcaaaggttatgaataagacattcacagaagaaaactgcaaagagctggctaataaaacaaaaacaatgcataaactcatttgtaattaaagaaatgcaaattaaaaccacgaagagatccaatttttaacctattacactggcaaaaattaaaaatttccattatacccaaatgtggggaaagaaacattctcatcactattggtgagatgttctttaagattaatacacagcacaacctagctaagttaaaaatgcaaatatcgtttgacatagctattcttctgtgaggaattgatcctaaataaagatatgcttccaaaagcatgtcaacaatagacatgcatcaatgtttgtattagcaaaaaccaaaacaatctcccaaccccatacagcctaaatatttaccagaaagctaatagttaaataagtgatggtacgcatatgtcataaatactagacaatcattaaagaaaatggattacactaaatttgctgatatgaaaatagatccaagatatgagtcaaacaaggtatagaatcatttatgcaaaattattcccttttatatttttaaaagaataaatataaagaaatatatatgtatgtgtgtgtgtgtgtatatatatatatatatatatacatctataatatctatattatagataaatagagacagccatgtagctcaatagagagatgcataaacattgttccggaaatatacactggaagcttatcaatgattactttggggaaggactagctattgatcagcaaatagagcacctaatatttataatttcctgtatagtattaatatgtaactatgtgtgtaacttgtttttaaatgctaattttaaaatttaggcagagaaaatcttactcccacctgattctttcaagtaatgcttaataattgaagaaattccttgaggtgccacaaagttacagtctccttctttcatcaccattccttcaataggcgagcttagaggcctcaaaacgccataggctaacagttcatcataaaaactgaaataaatcaatatgtatatttaatgtaattatataccatgaatagctctaaaagactatattttctttcaataattctcagaggttataattcaaaatcaaaattagatatcttcctatgaatattttgtattaaataaaatgtataatttgtgttaaataaaacttataatacaggtgaagaagagaaatattttgagaatccataggtcgtttgctgactttagtcaaaggcctatttctctgtaagcatattttaaaagtaaagttaatgaaaacaaacaaatgtatttagtatatcaattttaaatttggttcagaagattgactcccatcacagctagttgccttcttccataacaccaacatagcaattgatatttatcgagcccttactatgttccatttatcagctaatctaatcttcacaacaaccctatgacatcacacaactgctaagattgattccactccttgcaactaactcaccgttggtgttttttggcataatgaggagtgcaggtgatgtactgagcacccaagtcagctgtgcactgaggattatgaggactgcaggctgtagtcattcttcccccttgaattaatccacaggaaaatgtcttactgcatgacaatgagccttagcaattaattcaatgcaccttaggttaccccaaacagattacttcaaaaatatcttaagaaacttttttaagttgaagtatttgatcagattgtgagattttagaaggagtcatgaacaatgtaacagtgtccagcaccattatagtgcatatatttagtaataggagtcagtgaatggataaaactaaaaatgatgaaagaaatgtcagaataaatgagtcaactaatgctctttcattcatacagtcaatcttcatgagaatgacaggattctgcaaactagatcttcagaaaatcttggtctatgatcactttgggagtctcataatctgcagaaagctgcaaagccaacagacagaccaagacaaaaaatctatttattagggacagcagtaggcccaagctttgcaaactcgggtcggggcccctcccacgccgctgtctcaggtctccctctgtagagcgcggggtactcctgccgggcccccaccctcgcccccaccctcgccccttcttgggccttttcccgggcggcggaagtccccgatcacgtgacgaggcgcgccactcggcgcatgggccgcgctacacggccgctcagggagctgagggtatagcgttttcgccttagactttcttgggtgcaggcccacaccacctcagcagcctgcccggcagtcctcttttcccaggttttggcgtttagacaacccacctgagtcctcagccttgtcccacacagcaaggtacaagggaccggacgtctgcctcctcagcagcgcagcgcacaagcttcctgtcatcccggcgcccacgatcagcacctgcgccatggcgagagggagcagcgatccgcgctgagtctctgcggcggggccgttcggcccgggctttctggaaaggcggccgaaccggcgctagcgctctttggttccgtgctccctgggccgacctgggccctgagctttcctccggccggcctgcagggggcggaaaggaggcggccggagctgagaggcccctccgtccttgaggagcaaacctggggctgcggagaaccggggctgtctgtcttctcgctttgggggccgggcgccctgcccctcgcccagaaaagcctggaaatggtgtgggctattgttgggagaacccgcctcgcaacagagctgacgttgaccacagcagagaagcagcttaacctatctactgcgataactctcatgcctgttgggatttttgctgttttactattctagatttgaaagtgggaagaagaatttaccagcgataccacgggcaacctttcctctaatgcttgaacggccactattagcataatagaaacatcttttggaatctgggagacatttttcttagacctgggactttgtgtaaccttcctgaacctcaatttctccatctgggaaatggaaacaataacgtatacctttcaaacttgtaaagattaaagacagttgattcatcagaaaattccaaattactcttcaataagttctatgtcagaacgcattccgtatgttctaaggaatataaagatgaacaacaagagaaggattggtgccattgccgttgtttttttccccctcctgacattgtactggaagttctcaatgaaacaacaaaggcaatggtaatactgaactattaaaaaacaaataattaagttacgctgacttgcagataaattattacctggaaaactaagaaaccgaataagtatcagaaccaataagaaaattgacaatggtagccaattataatggaaacatttaaaaatcagaatatttacttcatgtccacatcatgaaaaaaattaccatgtatcaaatgggtgacgaattaatactagatatatctaataaaagaactagaagaaaatgtagacgggcatatatgactaagaagacatttttaagcataaaaatgaaagatggaattgaacagaaaatacataatcatttacaacttgtgtgttacaaaatacacaaaacaaaatacaaatagtaaatttctgaaaggtgtatgaaagattaaagttaatattatttaaaaacattattcaaagtcttaaagacacaaatgacaaaagccaaaaggaaaatgtgtatatattggatagagttcttgaataaaaagaaatacgtaagtccaataagcatgtgtttaattttttatattcaaatacaaattaaaatgaggtactatttttcatttgttgagttttttgttttttctttcttgagacagggtcttgtgtcactcaggcaagagtgcagtggcacgatcagggctcactgcagccttgacctcttaggctcaagctattctcctgcctcagccacctgagtagctgggactacaggtgcccaccgccacgtgtggctcattttgtgggtgtgtatactttatgtagagataaggttttgccatgttccccgggttaggaa

SEQ ID NO: 520 - DNA, 410489 bp, Homo sapiens
  source 1..410489: mol_type = genomic DNA
caaggagtatggatgaaattttgtccctcctccatgcacccctataaaacaaatatgatgagaaattaatattttccaaatggtgacctaacctttgttcattaattgagctcctattgcattccaggtactgttagaggccagcaagatacctagatgattgagacagagtcctcgccctccatgaagtgactgttcattttaaaaccctaaagctgggttcttagaggctactgcaacagcaacaactcccgagtgagtgcttatcatgtgccaggctctggttacaggctttaactctctcagtggaaacagcctgagtgctggcttggctaccccatgtctgtgagactgtgggcaagtcatttactttccctttgagtttcaatttctaaaactgtaatatggggataatatatgtaaaacagctaagaagtatatacttttaatgactctttttagtgtcaatggaggatttgtgagcaaatgcatataaaacacaaggcaaacaggaggtatttagtaagtggccacgtgattattgagagactatgggcttcttcctgttcctccagagcaagactgacaggtgtcctattacccttgcatcttcagagcctagagcacagccctgaaaacagcaggcgctcaccactttttatgatcaaaggcagtctctacagggaaagtcaaatcattatgggtatttatgaattacaaaatccataaagttaaaccaggagaaatggacaaaaacacactcattgtagaggtctttaatgatcccttggctcatggcagagcagctagacaaaaaacaaacaaacaaacaaacatgcaaagattcagaaggcctgaaaaaataatgaatacaaagaagataaatcgatacagtattctatcttcacattcggaagacaaaaacacctttcaaaaaaccatgggacattggcaaaaataaccacagataatcctcaataaatcttgccaggaggcagtacagatgacattgaattcagtgagactacaaattaaagacaaaaaggcgaagtataaattacttgtgtaagaactctctcaactcttgggtccaagaagaaagcaaaagggaaattgtatgatagcaataaatgtgccattacccagagtcacacagctaacagtgacacagctgaggctgctagaacctgggtctactgtcgtccagccacgaactggcttgagatcccggataagtctctctgagcctcggtttccccttctgtcaagtagcctcgaaggtccccggcgctcggttcggtggcgagtttgaggagtgtgggggaggggaggggagggagcgtgcccgagacgcgggagccgcgaccgctttctgcgaagtcggggagggtgcgggcgttgagaggctgcagcagagggcgctgggtcgccagcctgggccgcgtctcccattggtcggggctggggcgctgggctggagagttggtggaaagtgacaagttgagcgagagagggagcgtggagagctggagcagccgccaccgccgccgccgagggagccccgggacggcagcccctgggcgcagggtgcgctgttctcggagtccgacccagggcgactcacgcccactggtgcgacccggacagcctgggactgacccgccggcccaggcgaggctgcagccagagggctgggaagggatcgcgctcgcggcatccagaggcggccaggcggaggcgagggagcaggttagagggacaaagagctttgcagacgtccccggcgtcctgcgagcgccagcggccgggacgaggcggccgggagcccgggaagagcccgtggatgttctgcgcgcggcctgggagccgccgccgccgccgcctcagcgagaggaggaatgcaccggccgcgccgccgcgggacgcgcccgccgctcctggcgctgctggccgcgctgctgctggccgcacgcggggctgctgcccaaggtaagaggcgcccgccggcccccgcccgcccagaccccctgacccgtggccacccttccgccgtccagccgggcgcgggacacgcaggaagcgccgcgctggctccggggcgcgtccggccacccgccacggggctcgccggcgccgccaggccagggtttgccccggagccccgccaggccagggtttgccccggagccccgcggcgggccggggcgcgcccagggactcgttcctcggtgcgcagcagcgattgtcagcgctgacaggaagcgtggaggggtttgagggtcctgggggtgatcggggcacttctgtgcagggcgtccccccttgtctccctggacctctagcgcgccccagccggtgttcaggcaagtctatcctgcccccaagttgcgagccggcccggaaggcgcggtccaggagggagtttggattttcagtggtgctcgccagagcccaggcggctcgcggatcgacgcaaacaaaagccctgtcctcctggggctccggcggcctcgcatcgccaccgcccccggccctccggccctcccgagagtcatcatagaggccaaaacttgtgcgccgctgcagccgctgccactttgtgcaaaatgtgctgtcagaggcggcctgcggctccaaagtgctttgggtgtgcacgcgcgcgcgcgcgcgtgtgtgtgtgcgtgttacaaacaagagggggaaaagccatctaatgcatatttgattttggtaatctctaaagacaatcgcaacagttagagaaagacttcaccgcaagccggagcgtcttagttcgctgcgggaagctggggtccttgctgcgtctgagccggtacacaatgagagggaagagcccggctgagcctgtggagacaaccgattcattctttggaggttggagggggaaagttgattaaagtctccggggtctcgggcctcacttttaacatgcatcccttgagggggtgaggagcctttggattctgccctcccccactcccagccctaaacctgagcggataaatagatctctgctcttttatcatgcatctttcatttttaagttagcactgtgtttaggaaaagaaaaagttctgcgctacttagcagttgagaggaaaaagatgtattcactacatagactacgaatgcagaattagtttttactaaaagttagctgactttcttggtagaaaacacactctggaaggaagttgtgtgaaattttgatttcttagagatggtttttggaagctagagtagcattttctgaggatgatttctgaaacggatcctataatgtggtcgtgctaatctgaaagctcctgggggtaaatagagctcctaattgtaattaagatgtgcatcagcagggagtgcaccttcctgatgaaaaatcctaatgaaatgtaaacagcttggtcacatagatgttttgcttggtgatgccaaacatctggccttgcgccacaacacctgggtgaaaagtaaaaatgggccatgctgcctaagtaatgtaaacatccttctcaagttgggttgcccagcaaattgaggtggagataagcagggtgattttaactaaggtgggactcctggcttggggctttggttaattcagttatttcccctgtggactcctttactttgtacttcacctttcaacaatagttgcttttagatcatagccccttgtgggggtgggggtcacttacctttaaatacatgtccctgcattgattttgctcactgtaaacacccttcttatcagcagccaccccaattctgtctcctttaactgtttacagccttttagagttgtttaaaaaaggtattgcctattccattgtagcaggaggagccacagacaaaactcctcagacacccagtgagcaattcctgtcccttttaagggctcacaactctaagggggtccacgtgagagggtcatgatgggtacatgactgggggctgcatgcactggtaatcagaacgaaacagaacaggatagggatttttacactgtctttccatacaatgtctggaatctatagataacataaccagttatgtcaggggtcgatctttaagtaccaggcttaggtcaggcaggcccaggcctggtttcgggtctggttccttggtttcaggtctggttcctaggtgccgggctacctgcctttaatttcgcttctctttccttttctgagtataaaacaatataaaacaatatgagagggtctgtctctcttctctcaccatactctttagtaatgagctcaaatctgttattattgtcttatttgttgttttataaatccctttccattttgtgaatgtttgatcttttctctggggtcaagacttctggtagaactcacgtttactttctcctcttggactcaagattcctaaggtagcccagccagtggctcaggaaatcagcttaagcggagatatgtttcatgtatttatttaaaaagatacaaaacatttctcccatcatttttctattttgttagccaggagaagaaaacctttaaatttattttttctggtctgtccattgttgatttctcatctaccccctccctatgcaaagctcaacttctttaggaacctgaagcttaccttataactgcacccaagcccagggctttaggaacctacctggcctttctcaaaatcttatagattctgtggtttggctgctgggagccagagggaggtggcttgctactgtgtttgctatcattttgtaaaccttccgttgccatttaaataggtatttgtctgtacttttagaatagaagtgtcttgaaggcaataagactgtgagcttttctggtgaaaacactgagagcccaagtccactagtcccaactttattagagatgcctgaaaatcctccctggctggctagggggagccgaaccaaggtgggatgggcaaagggtgtggtcaaattgtctccttcagttttggaaatatttaatttccaatatagattcagtatacatggtaggctgttttgcttctctgatgcctgggataatctgcctgatatttagtgaggggtcagctttgccctatagcaccctttctcttctgtatcttgagcataggcccccagttagacttttggaaagtttctgaaagtgtcacttgctctgaaattagtatcaggtttggctggtggtttgatggtgaacatctaccccatttcaaatatttctgaaaattttacacagcatcctatggagaatggaacactttgtaagctatatgtactttgatgtaaatgtatatgtacagatagcatatgtatatacacacatatatagtaagtggtccatagatatttgttgaatgaatggagaataactttttcggttgtatgcaaaattctgatatatgctttgcttagtaaaaatgcaacatggcatattttcaaggatttttccttttcttgtcccatcttctagtatgaaagaagtgtagtgtagcagaacttgacagtaaagctaaatggttacaagcacaggctttggcatttaacagacctggatttgaatcttttctctgttgtatagtgggtgtgtcagttttcctgagcctttcaagagtgttatgagattgaagtgaggtcatgcatgtaaagtactggagaacagcacccagccaagaggtgagtgcgtgaaattaatttggggtacatgaaattaaggatatgtgaacttccagaaataatatacacaattttatatgcatttttacggttctgtatttatagctatagctataatcttattttccaagaaaagtgtcaacctctgaacgataggaactgctgacttggagtgtttgatgcctgaggcaatgggttgtcttcctggggaggctgaaaggagttgagtgttggtggctagttctaggccttatcccaggttaacacactccatggaggccccacttctcacctcccagtttcccttccaccaggcaggctgttaattgggcctgagagaagctgaagaatggtgccaagtccttgtgacctcaagtaagaaaatatgtctctgaatccaagcattctgagatgcaatttgtacagtttatttaacaaacacttatctaatccttacaatgggccaatcactcttctaagccttttgcaagtattaactcactgaatcctcacaacaaccctataagggagatagcataattagctcattttactgatgggtaaacttaggcacagagaggttaagttactttctttaggttacactgctaaaaagtggcattactgggcttacaagccctaacagttcatgctcttaccttagtggctgtcctagacattctttccttgtttaattcttacaatttatattcttttaatgtatggaacaaaggtggtatttcccaaggttttccaacagcagcaaagggaagcttgcttagctgtaatctagaggttataagaaattattggagacagccaatttcaatttcccttcgagtgctggagttccctaagacggtcttgctgaaactcagagatagactggaagcaccttgttggatggcctggatctctggttctggaagaattacatttttgtaatgagcttcaactttgatgtggtttgagaagtgtgctcgccagttttttccaactatcaataagctatattttgatgaagtgactttgtatttgcatcttggtggacaactgtggttgtaggctgagaaggcggggatttattagagtgctgtctagtgggacagctggcttgccagctcaaggtcccagtgaggaccagaccctggcaaatccagctccagctgagaaacactcacgtcttcaaggcctctttctcaaacagaagggccttagcctggcttcacccattccctggggtgtgacgggagagactgttcggtagaaactggaagagaaaggagagtctgagaaagttctctggagttgaagggggaggggatgggggcaactcttcgaaaatccttaactaaatgcagctgcttgttacacggagactgacttgcatgccaggaatatctaaaaagctaacgaatacaaaataaaaataaacagcagtaaaaaggctctctctttgttgcagtaagctcagttggggttttcagtttgtttaggaatgggataattgtggcatccactttattttggtaaggcagtgaaacgtggattaatgttatgtgattgggatgctaccaccatctgaactttttccttcatcccctgcccccagccacaccccccagaacacccaggcatggacatccataggacctgagtctcaaacagttgcccctgagtgaattacattggaagagggcagataatttaatgggataatcttggcagggccagcaaatttcacacctcatctctcactaatagaaaggcagcagaaggctacaacatcctcagatgaaaaggttgtataaaaaggctctgcttaacagtaactgtctgtccataaataaggttttgtacagtcttgatccaaaagctgttatgaaatactgataagccaagcctcataatgtttggcctccttacatttccttttcctgcttctctccatagaaccatagatttttttttttttaagagagagagggggactaaaaaaaagatcaacagtccaaactttatttttttcaagtatttctatacaggatggacttcctttgatagctgcttaaagaggtggcgtggagtaatggaaatagaatgggatttgagcctgatagggaatgggggtttgaattggggctttgttgccttcttgggcaaagttacctaaacttttgagcctctgttttcttatctgtaaaatgggaataacaataatatgtggcttactggggggttttgtgagaataaaaggatgttatgaacttatagcgcctaacacagcaccatggacttagtgaacgtgaagtatgttagccaccatcattatcaagggcttactgaagaaatttgaaaatctggcttcaaaacgatggtcctgctgcaaggtagcaaccaaggctcagagaatagcaagttttacaaggttttaggactccagagtgttttgttttatagggagcatgcagatgctctagatctgagcagtacccaggccagtgctggggacctggatggaagggattccacagtgcagttttgcaatgccttaaaacaaaggcttttttcagaacagcaagctctttggggaagagcaacccctcccaggtgcttagtgtaattccagaatcctacaatggggaatgttacatttcagggacctccacttgtaatctgaccgtttttagctccaatatccaaataatcttgctgagcacaacttgaaagagaaggataatggccggaggaaaggatcctgaggtgctctgtttgccatttaaattttctgagtagaagaaaaaaagttcatgttacccaaagagagaagagtaatgaagcgtgtgggaagcaggaggggtgataaagaggacttctaaagacaaagcagaggttgggtttgatattttatttttcaacagtgaagcttgtcactcagtgtatttcaactaacatttattatatatttatcacatgaaagatacagtattcgtgtccaggaataaagtattaactttgccctcaaggagagaggagaaaaattctcacttttttgagcacctgctatatgccaggtatcatttttttaaagctattaaatttatgcttctcagcactccttggagtttggacttctgatcctattttacagataagaaaatcgaggctcaggaaggtaagtatctcagccaaattcgtacaatgattaagttgggatttgggatttgaatctaggtattttgactctcagatgtatgctctttttgttatccttaaagtgtgattggggagacaccaatgagcagatgtggtaccacaggcaactatctctcccacaagtgaattataggaaagagttgtggaaaaaatgctgtgggaacatggggaagaatacattaattctcaggggattagagggtcagaggaagaacatgagtgcctccttcataggcttattgtgaagagtcaatgaaataattcatggaacacactcagactgtgcatagtgagcgctcagtgagtgttctgctatagttatgtagccagtgagaggcctgatcaggatttatctgcctctaaaacccatgtactcttgctcccctgtgcactttttaaacagacatgtgattgttggaagagtaagtaactgtgcagtcaccaaatgaaagggaagacaccaatacagttgctctggtatattcaccacctgccctaatcctggcttttaggactggactgctttgggtatgggaggggatttggatagatgtggggttggaaagaatcaagatgtctcatcatgaactatagcgctcctagaactctggccaggatttaccacctgccctcattcattcattgatcatacattttctatgcacttacagtgaaccaaatattctgatagtctcactggagatgtaaagatgaataaggttagatcattgccttggagggtttttcaaatgacagatttatggcagagattgctagctgatcaccaaatatgtttccatctcttccggtcatatgactagacaacatttctcagctttctcacagttaagtgaagccatgtgactaaatactagccaattaaatgaaattggaggtaatttttgtcgcttgtaggcttgacccataaaaaactccccaggcagaatcggtatgatccttcttcggtggcttgacaaccttagaagtcatgtgttgaaagtgtcacaacgtggaaagagcctgagactctcccttaatcactgtgtggtggaagccacacttgtttaggttttatgtgaaccaaaaacaagtgtccattgttaaggctgagattttgaggttttttttttttgtttttttttttgttacagctgctaatgttaccttaactaacatgaggttgtaaatcagtgtgtggtgagatcaatttagtgggttaggaccagcatttttagatagaataaaataggaaacctggtttgtgtctgaccacttcatgcagacctggggctccatccagtaaattaaaccccttcccaaataatttatggcacacatagggtgcctctagcactgtagagaatctagaagaatgaagggtggcctttacccttggggagtttaccttttaggggcagtaaaataggcactttatacagccagtgagtacagagttggcaattatatatgcagaatccctagaagggtgggtctttcgggaggaagtgtgatatgatgtgagccttgaaggaaggattgagagggtgcgggattgaaggatgggagatgggaagaggagttggacatttcactgctggaaaagggctggagttccacagcagcctgcagctgctctgggggtctccatggactcgctgagactatcctgagttcttaaaccaggccttcactgtggaatgaagctgatctccaggggatgggagagtgaagaaaagaaagacagcgttgaatgaagcctgttgtgtttttagcatatgaagggtggaggaggagagagaaggaagcagtttcactgggagcctgaagacttgtctttcttcccaaagggtgtcccagggagttaaaaatgttgtgcatttcagggctgcttgtcaaaggtatatgatggtgtcttattgtctctaatgcagccattttctcttatagtgcaggctacttaattctattccccctcttgtctgcttgatgaaaagaataatagtatactaataattaacacactgagcatactgtgggccaagtactattctaagttctttaagcgatttaacttgcatagtcttcaggacgaccctatgaggtaagccagagttctaggagcattattgttcactattaggcatcttgattctctccagctccacacctgtgtgaatcctccaccatgcccaaagcagaatccaggctaaaagccaggataagggcagatgggagaaaatacaagacgaactgtcttggtgtcttcccttctatttggtaactacacaactacttactcttccaacgaccacatgtctgttgaaaaggtgcacagcagagcaagagtatatgggctttagaagcagattaatcctgaccaggtctttcaccggctgctgaacactccttgaacactcacaatgcatgtggcagggtgctcagtgtgttccacgatatccccattttccagataaggaaactgaggcacagagaagtaagtaacctgcccaagaccacacagagagttaaatgggaaaactaggatttgaacctgcatatcctaaggcctgagttttgttcctaatcattattatgccaaactgcattgcagttttttttttcaactctgtctgatgattaaaattctctgtaagatcccagccaaatagctgagtcaaaataattataattaaatcctccatttgtatagggctttgcagcttacaaaatcattttatgtacagtattacctttaattttccaaaaaatacagttaaataggatttatttctctcttccttttaaaagtaggcaggtgagtttggcagctcacacaaggtcactctgtagctgtcagggcctgtctaaaacccagccccttggacttagggcccattgaactttctgctctaaagactacttttgtttggaatttgtgcctctaatatactgatatatgactattttcactactgtttcaccaaaaggtgaatttgcctgattttcacttgtttcatccacaaaatcttcaaatagctgttgtctttagaaacagttgaaaggcatttgtagatgggacctggctctgggatttctgtaacctgggaaaatttacttgcaaaaagacagagaagttacttaaaaacaggattttcctaagtggttggtgattgtggcagggagaggagccaggaagagaaggactttggcatcagatggactaggctcactactgctctgccaggtcagcaaactacgtaacctctgagactggctttcctcacgtgtaaaatgggagccataatggtgcctaccatgacagagggggaaggaccatgggtagtgtttggcacagtgcctgggccatagttggttgttggtgtgtgatcgaagctacatctctcaattgaatggagagcagcaattcttcctttaagatttttcacaggatgggatggggcaaaattgctagttctcagcgccttgttaggcatgattttataatacagttatctctgacacggactttcttagcacctggaaatcttaggttataattatattgtttctcaagggcagggactttcttatgctctgtgaaggttaaacatcataaggtaaaaatagaacatgctgcctgaaatcctagataccctggaaaggctcttatctgttcttcatgggaaactgacaccatttccggatgggtttagacaatgtacatgaaagcaacttattctactttttctccataagagagattatagccttgcttctaggatttcactccaactggggtgtttcaaagtttttacataattttcacaccccctggagagtattggctgtttttcttttttctgcctgaacttccattgtggtgatggactgtattagcctttcatatgcctaccttaaagaggtaatgcttaacccagtcatgactgttttatctcctcccttcagagaactgttgtgtgttgtatggggattttcagtcccaagatattgcctgttggagaccagtggtgtgtagaccactgaaaacaagcagcaactatatatatatatattttatttatttatttatttatttatttatttaattttttttttgagacggagtctcactctgtggcccaagctggagtgcagtggcacgatctcagctcactgcaacttctgcctcctgggttttttaagtgattctgctggctcagcctcccgagcagcttggattacaggcgcctgccaccacgcccggctaatttttgtatttttagtagagacagggtttcaccatgttggccaggctggtcttgaactcctgacctcaagtgatctgccccgctcagcttcccaaagtgctgggattacaggcgtaagccaccgcgcccggcctacgcagcaacaattttcgatgatgttcttaatccaccagtgatttaaacctctttttctctgtgcggctcatagcgctttgcccactcacatctggtgtccctaagtcaaagcattgaaaactttgcctgtgaccaggtagtcttcagtgggttagagtctgctgtcagggcctcccaggggacacgtgataactaatgtcctttttccccactgaggaaggggggagctgaactgagcatgtccagtctgtgctacccagctcatccctaagttgctgcctaggactgtgctccgggcctctgcaaggaggagttagtaaaggtgcagagaaagtccaggacttaacactgattagtcttcctccccagaaagaaagcacctggcacagggaataaagcatttccccccttacgctggctacaacttgattttttttttttttttttttttttttttttttttgagacagagtctcgctctgtcgcccaggctggagtgcagtggcacaatctctgctcactgcaagctccgcctcccgggttcacgccattctcctgcctcagcctcctcagtagctgggactacaggcacccgccaccacggccagctaattttttgtatttttaatagagacggggtttcaccgtgttagccaggatggtctcgatctcctgaccccgtgatcctcccgcctcggcctcccagagtgctgggattacaggcgtgagccaccgcgcctggcctttttttttttttttttttttaaggagcaattgtcagatttgatggttgtgttggggttaaaactatgtagataaggtggtcaaaaccttttagaaataatcctcccacatctttcctgagggcttaggtttagaaagtttcttagccatcccaggatgtgggtgaaagtggcttcccccagactcatcaaatacacagagcaattgatctgagtgctggtggatgggagggaaggaaaggaggggcccaagaggcgcagctccacctgcccgagggagacgtcctgtgtaaactaacaagaagtcactggtgcttcggtttggttaaatactgatttagcaactgaaagggatgcaggagaaatatggcaatatcctctccagtaagaagtttactgtttttgttagggaggcaagactgatacaccccaaacggtatgggaataatgaattgatccaaatgtcagtggcctgcccttggtttagggccctttgcctatcttgaagcctccaggaatttctaccctcacaccggcctacctccctggcatatccagctcagactctttcctcttttcatttcttcttgctgaattcttgttcttcaaactgtattgcatccacatccaggaaggcaccctggcctgtttcagcctgtcagtccttcttttgtcgtctcaccttccaccagtattctcacataggccgtctaaatcacacctgcttatgctgatttagcccaacacctttgcaataattgtcactgtcaagtattaagcattgactgtggacccagcacctggcaaggcattttgtattttgtagtggaatcatattattttctccctgtagaactattgcctttctttccttccttccttccttccttccttccttccttccttccttcctgccttcctgccttcctgacttcctttctttccttccttctcttttttttttttttcttttttgatggagtttcactcttgttgcccaagctggagtgcaatggtgcgatctcagctcactacaacctccgcctcccaggttcaagcaattctccagcctcagcctcctgagtagctggaattacaggcacctgccaccatgcttgcctaatttttgtatatttagtagagacgggttttgccatgttggccaggctggtctcaaaatcctggcctcaagtgatccacccaccttggcctcctaaaatgttgggattacaggcataagccactgcacccggcctatcgccctgatttcaatccctcatctgtcactccctcattctgggaaatgccccttcatcagtttcaaaaggaactaatcatagtctttccttgggatttaggggcagcccttctgggatggggaagctgagagatgcccttggtcatgtctgagcccaggaaagaagctggtgtgtaggagagaatgacttcatatccagagcaggcactcctgagaggcagaagaggtctgacagcctgccaatctcttttccacctccctggggtttccttatctgagccagtagacgctgctttcatgaggttattgtgttcctacaatgcacacagcctcacctcactaatcctcataacaaaatgaagtgggtgttatcctttttttaaagctaagaggaagcagtttgattgctttttctgatgagaacatttatatccattaaaagcaaattcagaaatgtataatgaaaacaaatttcacccattatcctaccattcagagataacttctgattgtgtttatacacgtggatttataaaaggaggttatgcttttattcccaaaagaaaactgaggctcagagatgttaagtaactcctctagggtcaaaaccagtgcaaatcactaaaacgtgttgactgtctgttaaattcaatgtaattaagtgccacagggagttacaggcagtaggttttgtggatcaagaaggaaagaggccggcattgattggaattactgggagggttttctgaaggaggtggggcttgacagagtgatctaatatatatattatatgttatatatatatatatattttaaggcttgttttattttaatggctgatctatataatcacagaagccagtatgtacagacaaagtggaagtttttatttccttgtctcttcctccttggacaaggtcttgatgatttcctccttcttgacctggaggcactctttatggcgcttgcatgcttccttggtcttagacctctgggcctcaacctggttagccaggagcttcatgcgagccttatctgccttcagcttgtggatgtgttccatgagaatcgcttgtttttgaacacgttccccttaaccttcaggtacaggctgtgatacatgaggtgatcaatcttcttagatatgcggtatcttctgagcagccagcacagaatcctcattctcctcatccacgtgaccttctctggcatccgggcattggttgtaccctttcgcttacctatgcccatgtgcctgcccttccggtaggccaaggtgttttcctggcatcgagcctgggaatggacagtcattggcttgcggatcatcagcccatctttgatcagcttccagatctgctgacaggagttggcattggagatttcattggtttcattggggtccaaccagaccttcttcttgccacaggggaggaccctagaggcaagcctcttctgaagcctgagcatactcatggctgtgaccatagcagtgaaaggtgagtgatctaatattgacttgattcctcccattaagtggcctctgagtgggcaaagccagtgaatggggacacctgagcactgcctgctgtcgggactgggcactgcctaagacaatgattacttttgagcttttctgaagtgaaaataagtcaatgtgaacatggcaaagagggacagaggaagagacttatggtatctagaaggaagttggcaggtaacagggtgccaggaaattaagacctaaagaaatagagtggaggagaaggagggtgggggcacaacagtggattgtggttttgcatttgaatcaggaggaggaaaaaaacacccatccttcctctccttttttttttttttttttttttgtctttaaacaggcactgtcactctcttttgggattacttatttatatgtttgtctctccctctgcactgtgagatctgggtgaggaggaatggtgtttaattttcatgcatatcttcagtgttcagcacattaagcctggcacaaatcaaagagacactcattaaatatttttcaaagcaaggatccactgacatgactttcaggcaggccctcccaagctgtctacaaccccctctgtggtctcatagggcacctatgcacatattggcttttcatgggctgttccctcccacagaagcacctttcccccacccatcagctacagtccttctgtcttggctcagatgtcacatccctgactcaacaggtgagattagatttccactcacatgctctcctagcactttgtgttcttaaataaccttcattataatttgtcattgaatatttatttgtgtaatgactattttttgggatcttctctatcactgggttggatgctccttacagtagggtctggttctggatctcctgagcctgggccagttgaatggattctgcttttacttttactaagcattgttcttccttcctagaggccgagataactccagcttaccttggtgtgactatctaggaatttaaaaacgcgtcttcgaacaactgaaaatctccaggctatctcttccaacagttgaggaatccagccctgtaaaaagtcaatcaggctaaatgacacctgctgtgagttctgtttgcaggagagcaatgggcagctccagagctgggctgttttcccaacatggagtctgtgataactgggttttgctgctataaattagggtcaccctgctcttaattggcaaccaattcagattctcccttacaatcctcctctttctcctttttcgtgtggactgtgtttgagagaaggtgtggaaaatcctggcactgtgctacagggacggtgcacctgcaagctgggaatagaggtggtgaatgctggctgccggccctcagcacctttttctccctccctgttgctctgcccttccctgtcttttctcaggaattttgaaagaggtctcattactagggaaatatcccctggggagctcttcctctctcttctttctctcaatgagtagaggggaaagtgttctcagttttgaacctgcaagccatctggatgcaaagatggccagaaatgcccccttgtctctggatttcctacagcaactctgccttagcctcccagtaccatctgcttcaggctgggacatctttccttcatgcaggagaaaggggagcttaataaaattttgctggggtttcttggggcctgaggcagtagtggggaggagagaagcctgggctgttttatttcttgcacctgctatgagtcaggagtggtccttggtcagcaggcacatggaggcctgctgggtgccaggcattgggcaggtgttggggctacaggattatctgctaggacctcaaagtctggccttgtgggcagcgtgaaaacaatgatggtgacacagtgagagtctgggcacaggtcctggaaggtgtggagagggagcagccaatgcaggctcctgttagagtgctggagacagaatcaggaaaggtgactcaggggagtcacctttttttcactggaaaaaaatatgtctgggaggcactaaaacaagagcccattatgtgttttaaaatgatattagtaataatgtaggggtttatttggacaaatgagttcacaaaattgtgctgcctgtaatgttgattcttgactgagggataaaactcacttcccaggcccctttctgtaagccagttcccaccatccccttgaacctcagctgctccaccagagtcaaagcaactcagaaggaggctgagacccccatgcctcattgctaatcgatgggcatggtggatgggcatgagggtggggttcaggaccttacctagcatctgtcttcccagaatgttgctctgccctttctggggataagaggtcttagtttctttatctctataatgggaattataatccattccctgaagattatggaagattataggaggtaaaggctataaagtcaccttgtaaacctaaaatcctatctgagatcgaggatttagatggcaagtaccattttgtcttcatttcttggtgaagaaggatccatgaggcctcctttattcactcaacagatatttacgtggcaggcatcattcttgatactgagggtaaagctgtgaacaaaacaaagaccctggtcatggaggagtcaggaaatacagaaatatacatgacagcaggtaacaggaagggccaagaagaatgagcagggtaaagagcttgtaaaggaggtggggtgggtgctgtcgcatggggcagtctggcaggcctctaggtttaggggatttgagcagagagacctgtgtgaagggaaagggtgacccctgagactgtctgagggaggagcagtgagtgcagaggcattcaaagcaaatgccttgaaatgggagtgttatcagtttacagtacaaccagcaattgcttctactaccactggtaatatttatagagtctatactgtgtgccaggcagtattcaggtgccgcgacaaccctattcggtaggtcctatttttatccttcccccatgtcacagatgaggcattcttagaacaaaccaagcatccagataatacgaagagggagcagttctcatttacatggggagtgtataagtcacagccctgcacagagggaacagtgtatggtttggaaagaaaaaaaatctcagtttgggcctggcctgctactcatctgctgctagggcaagatgtttcacctctctgggcttctgtttcctgatttataaaatgggctaataaaatctcagaggattattatgtatattaagtgagagatccaagtgaaagaatgtttcaaactgcagggcaccatgagaatatcactttattcttcttcttattacgccaattctcattccttgcctcttgcaaagagagagaatgagagaaaaatggaaacttgcaacttacttaacttccttggttctttccctgaaaacttattttctactaatgtctgtgggagtgaattaactagagtatccagttgaattaagtattttgctgaaagatgaagggactgtgagataaagttggtgccgaggattctcacatttctaaaggaatcacttgaggtgctaggactcccagtccactcttccacaataccagacaacctgtaatcctcagacccagaatcttatgacagctttctctgatttcacattgtgtagattagctacccaaaaaagtaagtggcctcaaatagtgctgccctttaaaattattctatgcatttgtcccagagtcttgtgggatgaatggctaaatcctactggattaggcgagatgggtattattatctggggctacagaatggaaaaactcaggtgaaggaagttatcccaaacttcataattgatggtgagcctggatactcattctcaaatctggtgaggcatcgttggcttctaccatgatggcgatggtaagctcatttgtcaatcaaatgatcgattggcagtagggtgatgacagttaataataatctattatatatttcaaaatagctagaagagaataattagaatgttcctagcataacattatggctatcccagttaccctgatttgatctttacgcattctatgaatgtaccaaaatatcacatgtgctctgaaaatatgtacatctattatgtgtcaataaaaaaagttaaccaaatgatcgatgaacacctactatgtgccaggcacagtgctgggtgctggcaatgcagtggtgaatgagacagggacctgggtgcttgctctagggaatgcccttaggagaagctcagggtatgtttttttatttggaatgcttgctgattcccctcccaggacctccagaaagaagtggtggttgcttcagcggtcacttggtgatgactggcaggtatatacctgtgtagctggcacatctggtgcctgtgatcagagccgagccatccagtctgagctttgtttttcccagtgcagcagtggtttcctgcagtaagctccatcttggttgtgctgccctccccgctggggttgggataacagcctcctggggactgtggctaatctcaggagaagcagagaccccagggaaagactcctgtctccgttgtgtgcacctaggattagatagaactgccgctaatgcagttaggtaaaggcaagggccctggttgctggggaaccaggaagcacagggtgagcttcccatctgctctcagtgaaggacgtcctcactgtcaccgcttcctagggccaaaggggcctctgacaaagctaatgtgaccaaagtcaaaatatgggctccgagagtcagccaaacccattcaactaactgtgatcttaggcaaacctcaaagcttcggtttccccatctgtaaaaattggggtactaatcatatctacctcattaccttttggtgagggcaaaaatcagacaatgctgacggtcactggcatgtcctgagtgtgcatggtgagtcgtccatcaacaagagctcagatgaccatgttccaggtgaggaacccgaggcccaccctggccttgatcagaaataaccaccctgaattcctcagtgcctgagtctggcatcgaaactggcttccccggcctccagcactaggccacgaaggaaccagcttctttctctcactggtggtggcctgctgtgccctgctggctgggtccagagagacagaatgaggaggagctcaggacctgttatcagaggccagagggcggctctccagctagactgctagcaggaccgcagtgatggaatcacctgaaggtcttcttcaatttcctcatctgtaaaatgcagtggcttgactgccccttccagccctaaatttgttttaggaagcccactggaggaagcagcgagcaagaagggagcagcggagggaacatatcaatatgatgtaagaataatagctcccattttgtaagtcctgactgtatgcccgggactgtgctgggatacacagggtccagaacattatccattttctaggggctcacgcactcatgaaactggtgatagtggtggggtgcagtcgtttggggtgggtggagagacataataaccggaggaattagaatttgttttggtacatgccttaagagagatctgcacagtgacttgtggaccccagacgaggctgcctgtgtgtgcagagcctcgaatgccatgcagtgaagggaggttggaaccctgcatccagggaagcggactttgtggttgggagggcaggttcaggaaggttctggtgggagggttggcagccaggctggtgctccagagggctgatggattacattcttcgagttagaaatcatcagaagccccgctgagagggctcttgtggctttggagctatgccggaggttccctcttgcaaggggaaaaattggctgtgcctttaagtgttatcctcctgtcctcttggtttcctagtgtggcaagattcaaatccaaagtatttgcattgaatttgttaatttcaaccagtggtagaatagaataagaagtctaaacagccattttttcttcccttggagggtatgttttctgaccttttaaggaaaatcctgtcgaaaccttgaaaacttgtgactctaggtgctggatctgacactgggtcagggacatattgtggacctgccgtgtgcttgggcctgagctgagcaagctcatggagtaagctctcttgaactcttaagatcgtgaaaatacagttccaagccacagaagccctttggagtgattctgaatggtgggagggcagagaggctttgaatgctgtttgaacacttagactgctaagtactactcttcaaacacttcacgtgccttagatggtctagtgcaaaggatatgcaggaacataaaatatcttgccgctactggaatagccttatcttctgcctcaatattgatttagaacaatagcttgttttgaactttctccccataaattaaattttaatttagaaaatgccattaggggaaacttagtatgtaagtacagaaggttttggagatgggggtggctgctcagaagggagtctttagagatgacaaaggtaaaagcattactctaatcagaacatttcattaaaacccccatcagactaatctgtcgacacatagtattttgagtatcttttgttggcaacattctgtgctggaaactgggagagagagagtttagctcttgtcctgtatgtatgtgcatatttatatgtgtgtagtattgtcttatatgggaaaggacgatgggatttttttttttcagaaacatttttcccttctacaaaggatgacatcagggcatagcagaaagagctctggactgaaagtcaataaacttgagtttatctcctagccctacctctaactagctgtgtggccccacacaaaacacttgccttctctgatcctcaggttctcatctgcaaagcaataaggttggaccaagccctgtgtagtggcagtgtcaacatcacctgggagcttgttagaaatgcagagtctcaggctcctctccagaactactggatcagaagctgcattttaacatgatcccaggtgatttatatgcaaattaaagaaccatggctttaaagaaccattcctgctctagtaatgtattattttgtgtttttttccaaatgcatattaaaatatagttacgaagaatttatccaagactgcatcaaacattctacataaaatgggtgtatcatctcttaccctttaaaagtttgtactttgtgagaaaaaaggtttaaaggcagaaacaggcacaagcagtcgtacattcagttccagtgctagatatacatatttcttccttttgcctcctttgtgttttgggccttgacagtgtggtaagggcagcggtggagagaggagaggaggagttgcagagtcgaggtgactgaaggtggaaatggcaatgcaccgagccctgagctggcaggtggtccagagagcagcgggccccagcccagctcctcagtatcattgcaagggttttgagaatccaacatcatcggtgatgagaaaaatgtttcacatttttcaagcatatatgaaagtgctttgatgaattgaataacaattcatagtgattttttgatgttctatattttttctaattaattgattctagatgttaaacctattagatgggaagaggactctagttcatttttgcattaaaagggttctttcttacttgaagctggtgggaactattggaagagggcgtaataattaataatgatgacaataactaacacatgccgagaactttctaggtgccaggcactgtgccttgcaaaaaaggactttgggcatctgttaattaatttatggataaggaaaccaaggctcagagtggtgaagtgacttgctcccagtcatcctatgagtaattggtggatccaggctagaaacccagtgtcctggctgtggggccagctttttttctgctgtgcccgattttgtggtttgtctctctggtgctctggagtagcatgtgtgggaaggctgaacggagagtcatgaattttcccgagttcctcctctgggaatcacagactatcagagtccggaggactttcaaaagcatgcaggccacaaactccatttacaggtgaacacatccagcccagcaagggaagggaacttgctcaaggtcaaacaattagtagggtttatttgttctggtcttcctctacctgaaattcagctctatttgaacaagtgaaacaagcccttctatgaaagcaaatgaacacggttttgaatattgtatctcaggttgctgtgagggctatatatatctttaaaaaggattcagcatagccactggtagttgataaacactcaaatgatgtttgttatggttatcatttttactaagcttcacatattaaatttagggacacctttgttgttgttgttttaaagcaggactgattgtagtcttgtctttttttttttttttccatgttctctatcttcaggataacctttgagaggacagacgaccaaattccttttcactaaatactgcaccacataatcattggaagccatatactggcaagggagaaagttgcccttttgagaggctgcattcttcatcttatgagcccatgccatgccagccagctctcattgagctgagaagctatctttttggcagtaggtctcctgatcatgaagatttgaatggaacagacattttctgagactcagtcaggcatttttccactctgcatacaattgttaccaatctagagaagtaggaactggtttagaatcagagccagcttcataggtatgcaacctgtgcaactgcgcagaccatccacattggagccccctggttgatttgacgctctgcagggaaattggaattcttgatattattttcaataagacgccccacttttttattttgcactgggcccatcaacttaagtaggtactcttggttagaataatctagaacaggaccaagagcctgtgaggaacaagtcagtgggggttgcagtttttgggggaggaggaggaggccacagacctgactccttgtgatgggtcctagtattatacatgggcttgagccaggcagcatgcagtccgctgccatagagaggaggtaagcagggtggtttgttgtcttgtccacccatcactttgccttgtaagtatagacaagacactaactgctctgcatgtctcctttgtatccccagccctgatcacacatagtacccagcacatagtaatcacttaacacattgtggctatttactttattgctgctctaaagtagtccagagatgaaccattattccaggggctttacatgtattatctctagtttttctgacagcctttcaaggtagacatgatcgtcccttctttacagatgaggcaactgagactcagaaacgttaagcaaaagtatctctggttcatctctggactactttgaaaaaatagatgaagtgttgtgtgagatgcattataaactttcctatttttggtgtcagcaccatactttatatcttggctattcaggggcttaacgtcaatttccctgctagtaacctctttcttttattgattcaacagctggattaacttccccagcatcatcatttattagccacgtaatcttaaatacttttgcttaatgtttctgagtctcatttgcctcatctgtaaagaagagatgatcatgtctaccttaaaaggctgctaggaaaactagagataatacatgtaaagcccctggaataatagtgactggcacgtagtaggtgttcaagtcacttttcttattataaagttgacatacaaacagctttcattgtgtcatttcccttcctcaaaaatatcttcaatggctccccattgccatggccatggtggatcaaagctcatcatgatctagccatagcctacattgtctgacttctctcaccagtgtttaaaaacttctccaatgctagctgtgtcttgttccccaggccactggaacctccttggcgacagaattccatgttatcacttgagtgcctaggagcatgcctgtcatagtgtctgtatggctggttgctaatcacagtgtatttcaggaatattgtgcaattctgcttttttcccatttgtttatagctcttagttccttcaaattggaaatggattatggttttgcatttgactcaggaagaggaaaaaaaacacccatttttcctctcctgtttttttttttgtttttaaacagctagtgtcactcttttgggattatttgtttatatgtttgtctctgtctctggactgtgaggtctgggtgaggaggaatggtgtttaattctcatgtatatcttcagtgttcagcacattgagcctggcacaaatcaaagagacactcattaaatatttgtcaaactgatgaatattggaaagctcaagtttttatggcagacgagggagacagtgggagctgcctttttattggaaaaacattgtttattagatctgtatggatcatttagaaaatatgcagttggttatcttttatggtcaaagaagaaaatcagtataaaatgcttaattaaaagcaggagctaacatttcccctagtaacgaaggcaggcttgtgaatattttcctttccttagctcaggagatgggcaggcagccaggctcaaagatggggatgcttcatagacagatgagaaggtttgacttaggaggactgagtcccagggttaccctgggtccatttttgctttaatgtttctccgcatggatgttgaaaatgtgaatgaagagtgttaattccttaagatattctgatgacaatgtcaacccctttaaggtgattttgctgttacctataaaattatcacttgtttgtgaattgattataatggcatattttcaggagtatgttttgtacttttaatttgagattaaaagccctaagaagtgtgggtctttttcttattcttcttggtgctcctgtgcctgacacagagcaggcccttaaaagatgtgatacctggagttcttattcacttggcctcagcagagttggccctttcctgggtgtaggaaactgctgaggactaggagctggggaggcagaaaaggcaatgatgttctgaatgtttctgccactggaaggaaatcaggccctctgagacagacaatgattggatgtgctgcaggacaggaggtctgagtactggcagcatccacattacctgggagcttgctggaaatgcagaatctcagatgtgctccagacttactgaatcagacactgcagttcatcaagatcctcaggtaattcatctgcacattaacatctgagatgtgctgctctgatgagaaaaatctgggaacttcctcaaccttgagactcgatagtctggattttcgtaattctaggatgtagcatggtgaagtttgactgaccttgaatcccagagctgccactgtggggatattaattaacctttttaatctcagatgtttttcatctataaaaagtatatgttgggtattttgctaggttttttttttttggtgaggattaaatgaaataatataatgctcttggcatatagtaggaacttaataaatattacttattgctgattttgttattttatctgagccctggtgtagatggtttatttatttattatgataggagaaaattgctgtattattatgattacaatgttgtaattttgcattagttttatgtcatttatatgatttaatgagtattcttaaagaattaaaaagcatttgcatgcttttgacctcttgttttaacctgtttttgaatcttctactcataacatggacgtattatgtggctgtatttatgggtatcatgtttttggtcttttttttgagacagagtctcgctctgtcacccaggctggagagcagtggcatgatctcggcttactgcaacttctgtctcctgggtttaaacaattctcctgcctcagcctcctgagtagcttggattacaggcacccaccaccacacctggataatttttgtatttttagtaaagacggggtttcaccatgttggccaggctggtcttgaactcctgaccccaagtgatccgcccgcctcagcctcccaaagtgttgggattacagatgtgagccactgtgcctggccgggtatcatgtattttttaaacaccactgaatcacttatatttcattttggagatttcttcctcccatttattctgataataatgattaagtagcctttttatccagcactcattagacagttaatgaaaaaggttagttaaaatagggagtgaggaaatagtgaagaaatgaaattaactattttatctcactttaactgcctagctgtacattcatttaatcatgtagcttttcctttgagctgggtctgatgtttggagggtgctgtcttctttcacaaccacacctaacctgtaatacattttctgtggtatccagctttgttttctctaaagtggatagaagctgaaagacacaagtaaagcactgtaaatggggaattcttttagatacgtataatgcccccccatgtgtttatccttgtcttagagttaacacagtggtaattatttggttgggggaggggaggaggttatttttatttcactttccaaagaattgggcttaattttcacagaagcaacaactcgtcttatactcttgttttattaatttaaattctgtaaagtacacaatttccaaaaaattatatagctgaaactgtataacaagctttgggatcaaaccctactgaatcttgtcagaatagaactcaagaggtgggaatagtgcatggcttgtccaggagcatccacggagcatccttggacactaggtggggtgctctatagagggaatggagagccctgcccgatctagtgagttagttatgtggaggttggttaaaaaaacttctatatttgtttatttgcatgctactttacagttcttgaagtactttcaaattgattttctcatttaatttttacaatgctcatgaaataagcaaggcaagaatttagaggtgggaaaatggaggttcatagaagttgaattgtgtgactatgaataagtaatttccttgaaggtgcgttggaagcagagttcagatttttcagtcttaagccagatctctaccctctcttctcgattgcctcttttcttgctgttttgaaagcagtgatgagactttgattttatttagatatttataattttcttatagcattatgttaccatcatagggcatatcagtaatagtaacatactacatatgtcaatgttagacatttaatcacctctagcaacctacaagcaaataaagagacaaaactcctctggaccagcactgtccaataaaattataatttgagccacatatgtagtttgaaattttcctttgggcacattacaaaacaaaaaagaaacaaataaaattaattgtatattttctttaacccagtaaatccaaaatatcatcatttcaacatgcaatctttataaaaattcttcttgtgatattttgcactcttctttttgtactaagtctttcaaatcaggtgtgtaaattgctttacagcacagcttatctcagactagccatatttcaggtgctcacttgccacatatgttgaacaacacacctctgaactttaagaagaatattgtaacaaatgcaggcatgtgaacacttggagatacaagcctctaatactttggggccatttaatttcgagacaaatagttttacagatttcggtggctcctaataatgactccaaatcattaaaaataagattaaattatctacattgtatttaagagggccgagtatggtatgaaatatgtatttagaaaactctccatcaaatttttttttttttttgagatggactctcgctctgtcgcccaggctggagtgcagtggcgcaatatcggctcactgcaacctctgcctgctgggttcaagcaattctcctgcctcagtctcctgagtagctgggactacaaggcgtgtgccaccatgcccgcctaattcttaatatttttagtagagatggggtttcaccatgctggcgaggctggtcttaaactcctgacctcgtgatctacccgccttggcctcccaaaatgtggggattacaggcgtgagccaccgcgcccggcccaaaaatatttttaaaaaaggtttgacatataacccagccattgtactcctggacatttgtcccagagaaatgaaaacttatgtccacataaaagcctttacaggattgttcatggcagccttgcttgtaatagccaaaatctagaaacaaaccaaatgcccttcagtgggtgaatggttaaacaaactgtgctacatccataccgtggaatactacttcacaataaaaataaatgaactgtcgatgcactcaacaacttggatgggtccaaagggaattgtgctgagtgaacaaagactcagcaaaactcagtgaaaataatgttttactgggtaaaaaattatgagacattaaaaaaagtacccttttgagattatgctgagtaatctctaaaggttatatttatagaacattcccaaaataacaaaattgaagaaatagagaacagattaatggttgccagggttagggactcaggaggggggcgtcctgggagggggatggctgtggctgtgaaggaggatcatgaggcaactctgtggtggtggaacagtcctgtattgtaattgtaatggtggttacatgaacctatatgtgataaaattgcacagaacgcacacactcacacacaaacacacatgagtgcatgtcaaactggtccaatctgagtaaggcctatggatgtaccaatgctgatttcctgatttttctattgtattagtgttatagaagatgttaccagagggcaaaactggatgacgggtatgtgagacctctctgtgctatttttgtaacttcctctcaatctatacttatttcaaattaaataaaagcctggtgcttgaatagatgttctattatttgtaaagcctccttcctagaactctacagtgaagaaccccagtgaagatgtatgaatgaggatgagcgtggacatctgttcagggacccttttaattttattttatttttaccgttctttatttatttttaattatactttaagttctgggatacaagtgcagaacgtgtaggtttgttacataggtatacatgtgcagggctgctttttctacaagcttggggctgggcttatctcagtgcagaggggaatggttgtggcctagctgcaatctctcccctaaataagaagggaccccattcttgttccagtttcttgttaaggtcactgcagcagaggatgccatctctaggctcctgaatcagaatgtcccctgaggtgccattgggctgtttgaccccaccttgggaatgctagagcctgagatcttgtcacttgctcttcacattttcatattaatgtgtcactggctttcagcagttgcctctcagtaatgcatttagtccctggtgagtatttcatagccagatgaactttaatccctgaatgcgctgaaagggagggttccttttcctcttttgaagattctgctcccctgtaagaaaagtgcatgatttaattagtggatgaaagaaaagggcccaaatggagccaaaaaagagtcagcagcattgccacccacctgcagacacacaataggataaaagcagcacctgatcagggaggggaaggaacgaggagggagagggacaggcttggccgtgggtgtagcccggagttgggaagcccgtggcccaggatcaggtcagccactggctcagtgtgaccttggagctcagcctctgtgggatttgttttctcatccttttaaaatggagatggtagtatagatccttcctacctccagaaacatgtagacagcagaaagaagatgggggcaaatctatgaaagtataaaatgcactataaaaaagtataatgcagtttataaatgattgctcctaatgcatcaactggagtgaaactagccagagtgtaagagaggaaagaggggaagatgcagaactctgttcttgtatcttttttaaaaagcacaaaaaggtgatgtcttggtaaagagtagaagtttgacatgttttgtcgtgataagaatagaattactgtggtgactgtccatttatccacttgggatccgagcattccaaagtataagatgcttcattacaggccgggtacagtggctcatgcctgtaagcccagccactttggaaggtggaagcaggaggatcttttaaggacaggagttcatgaccagcctgggcaacatagcaagatcctgtctctataaaatatatttaaaaaattagcctggtgcagtggaatgcacctgtagtcccaaatactaggaaggctgaggtgggaagactgcttgagcccaggagttcaaggctgcagcccaatatgattgcatgactgcactcaaggctgggcaacaaagcgagacgctgtctcaaaaaataaataaaaatgctccttggctgtataagacatattttattgcccttttggagatttataatgagcacattaaagttttggaaaaatcctgcaacaaagaaatccgttttactttgtttagttcagtaactccttagtttattatccatggacccctctcctgtgccctgtgacttcctcctaacttgttacatagcctggtcaagtgcgctggaacaagggtactgctctgcagaattctgaactgagttcctggggttttgttgttagcttgtttgtgactgtcagactatttttttttttttttttttgagatggagtctcgctctgtcgcccaggctggagtgcagtggcacaatcccagcccactgcaagctccacctcccaggttcacgccactctcctgccacagcctcctgagtagctgggactacaggtgcccgccaccacgccctgctaattgtttgtatttttagtagagacggagtttcactgcgttagccaggatggtctcgatctcctgaccttgtgatccgcccgccctggcctcccaaagtgctgggattacaggcgtgagccaccgcgcctggcccagactatttaatttttgtaaataatttagtgttttgtttttgtttttgttttggcctcaaggaaactcaaggaaaatttgtacctcatggttagtttccattttagaatactgtgacctttgtatctttgtattgtttttcaagttttctttccttgtcttgacagattcacaggccctgacttaaaaattcttgttactgtattgcttgttgtatcataagccatttcagaatctgcctggattgagatgggctatgaatataattaagaaacaaaaacaaactaataaaattacaataacaactcttttttgagggcctgtcatttttcaggcatggtactgggttctttgcataaatgatttcttccttaatgtgatcaaggtgttcctcagttttgtcctaggaggttttagatctcacggttctaatttagtttctcagagtcttacaactgggagggacttttgagagcatctgaccctaagaaataacctccagggagatgaaagtctaaaccagccaggacagatggtcttctgagactctccatggcaacctgcagctaatctctgcccttctgccacttctgggaaaattgctttacggaaatgctgttttaactgggagcatgaaatcactaatgatgggcaaggtgggggtggctggtttgtgtttgggaaattaaggttcagtgcctgtctctctggggggagcagctgctgtgagccaggattacctaggacagtttctgtctgatgagagaaggggacaatgccttcctccactcaggtgggtgaaggaggactctcacatgtgctgagtttgtgctagcatcagtcttttcattgccctgccttcacataccccagcatctcatctaagatgtgtcctgctgacatgagccaagtaatgtcattcttcctcatccagagccatttctggctgtcccaggctttagagcgatttccctcacttggcataggtctttgcaatattttgttatatcatctttccatgtgtaagccccatcttgtctccttgtgtagactgggcactcctgaaggcagggatgatgccctacgcatggttgtttctcaagttactgttcagtaccaggtgcatattggtcctggggtggggatatttattgttgctgctggttggcatcagtatttggtaaatagagtggagggatctgtgctggtctctggagatacaaagatgcgtggacacttttcagttcatagtaataactgagtttcttgaggggagggactgaaatttattcatgtctctccaacactgtacctggcatattgaactgtggcagaggctgctacttgttcttcccaatattattattattagtggtagttgtagtaatagtattaatagtagttttccctctccttctctctttcttcctcttcctccaactcctactctccttctctttcttcctcttcttcctcctcctccaatagtaataggaactttacctgggcacgtttgccagctttccttgcagctgaatatggtcatgtgaggttctggtgaaagagacataaacagaggtgataattgtaacttccaacttgtgctttaaaaggaaagcagtgggccatctcctttttctccttctgttgggctggagcacagctctatctttgaccatatgaataaaggtcacacttttgggatggcagagcaacaaagtggaaggagcctgggtcctcatccttgctgagctgttgccatgaccctagactgaataactgaactgtttttatttgtaaagtaacatttacatgagagacaaatatacttctatcttgtttaaacttttctacctttgggtacaaaaggcacttattatagctgcctagtctgtattctgatcaattcaggaggtattgataaatgtctgttaaatggatgaatgaatttctgccttcccttattattgagcagctttaatagtggtcagcgcatacatttaaattgagaaaggaggtttcccaggtgactttcaccgtatttcattggccagaaatgtgtcatgtgggtctctctggctgcaaggaggctgtggatgtgagttttattttccagtcactgtagatgaagaaggcagaaaaggggtaggaaaaaggaggaatgagtgaaccaatctatagtacctatcagcagtcacatataagaaaattagttttcatttatgtttttttttttttaaagaatataagccacctaatttgagtattgccaagaagagatgtacttcttatcctagttgaaccagattttgggaagacaagatgttttcaaaagagtagataattatcagcgtggaccttggggctagatgtagtcatcttgtcacacaacttgattcatggccatttggaactgtctacaatgggatggatgttgatgctgaggccacctggtgcttcagtgtcttaaatgctttctttggggccacagccaattccaggcaaggcatggcaatcccatagtttgtaggtgatatggaaaaggtagtgtcagggcagtcagaaaccctcagcaaatacttaagtacttctgtgcaccagcaatgctaggtaccagggaatcccataaatgatctctctgccatcaagagggagatgaagagataaactgatgagtcccccacagggtaatgaatgccatatagaatgtctgtgaagagtattgggaacaaagcgggagaacaagacagaaagtttccctggaagagcaataggaggtacctggagcctctatatttaatttctaaagagattctaaaacagtgggtctgaaatatatagtctgcttccaaattgggtttaaattagcatcttgtgtatcatatatacattgtacttgttactctggggaatggagagtttcaaagaagtctagagttgaagcattgtccttttctctgtctaggggagacgcttaagcaaacgtgaatgtacttccaatgtggcatctaagcagagagaccatggaaaggccaagttttaagaattgagtgtttctcctttcgattaaagaaagaaagttgctcatgaatatatgtcacttcaggcaaggggcatgggatcctgaaaatatctgtgtcagaaaatctttgcaaacaaaaatcctcttccacacctttccaaagtcaagaatacgttggacatttaacattttaggttttggattttcttaaagcaaggcacacaagaagatcaaagaaggtgcattgacatgttggcaaagaagaagcatgaaattcaattctgtggaactcattttaccagagaaatttcataaaacaaagtaaacttatcagtggtttaagttgccaacccttggattccaatgcaacaagcaggatggatgcaggcagcttgcccaggttcaatggagtttaaaggccaggtgtttgtgtaggggaaggaaaaacattgtcctgctcaggaaaaatgtattcaaataagaaacgagaaacccattttgagaatttagtgcatatgttcattttacaggtgtgttgggaaattatcggcaaatgaatggatttggtcacaaagcctttgggttgatttgggggaggaatgttgcttcttgggaaacagccagaggaggcaaaagatatttttgggaacattctaaggcattctctttcctcttttttgttgatggcttccaagttgtctagccctgaatctcttatgtgcattggggaattacatagcggtagaaggcacgcatcatttctttacttaactatgtgtccagaaccattgttgagttctggagatgaacagacacacttcagcctttaatgaactgctaggcaggagggggaaacacacatgtaatctaaataatgtaatgtaatgccataagtggtgtaaaggcttgtggttttggagaagaggaacagatgaactgtccagaggacattagagaagccttcacagaaaagattatatttgagctggatactgaaggatcttgaaggtgattgccaggaagaagggaggaaagggcagaccagatggaggtatccacgtatgcaaaggcatggaggtgtgaaacatgatgcctctaggggatgtctcatttagctggaacacgggttttgggaggcccatggaggctattttgggaaataatactggattgcaaatggcctgatatgcttgctagtctacaaatctaaacttaatcttttaagaagtaaataacttctctgtaggaaagtaactacaaacggtaaagaaagacatgcttgtcaaaaaggccagaactcctgaatgtggaccccaggaactcacatgtactatctggtctcccccaggttctgcaaggacatcaaagacctgaattttgcctagaaactgaccctaagagagacaggaagtagtgagaggatacagacccaaccgactgtagaaaactgtgggattgaggttaatatataatttgctttaacttgggtgaatgtggaataaggagagtggcaaaatgttaagttcatactcatctgtttataattgtgtgctctgagcaccctttcctttaaagtgggctgcacacacagagaaagaaacatttttcacacagtttggaccagtgcctgaaaagctcagactcggagcgtccaggagctgagatgcctgtgctggacagcccctgattggagaggagttaatgatcagtgcccctaaaattgtcacataggcagctgattatgagaaattggtccagctgtttaggttacttttgagatcaaaattttgtgttttgtcaggggagtgagttgtcacaaaccccatgtggccaaggagagactactagcctgcccttgtgccaaaatgttgcaagcttctgtgggcagctgattttagtagaccttatagggaaacccctcactccatcttttttttcccctccttcctacactgagatgtagcaggaaggaccctggcctttgggactggaggtgtggttagctggaagtaagtaaggttctgctagttccctggtgaacatagaatggtacttctttctgtctcctcatctgtgaggtaaaaacattcagagactcagtgtttcttatgacattgataagctaaggttccactcccctttctggcctgttttgagttttccctgtatactcagtgagtgcatatgatttagaaaggtctgggtggctcaggcagtgggtgtgagaagagctgcctcactttgggctctatgtccttaggtccaggttgggatcaagtccaataagctaaagaaggctttcgggaaataaaaccagaggtgttttttttttttttttttgagacagagtctcgccctgtctcccaggctgcagtgcaatggtgtgatctcagctcactgcaaccgccacctcccgggttcaagcaattctcctgcctcagcctctccagtagttgggattataggtgtgtgccgccacgcctggctaattttttgtatctttagtagagacaggatttcaccacgttggccaggctggtctcgaactcctgacctagtgatctgtccgcctcagcttcccaaagtgctggagttcgctaaccaaggcctgcaggccaaatttggcctgaggcctgtttttataaataaagttttgttggaacacattcacccacatgcatttacatatcatctgtgattgcttccatgctaccatgtcagagttgagtggttgtaacagagaccatgtgggctgcaaaggtgaaaatatttactagctagccctttacagaagaattttgctaactaacctgtcctagatcataaactctaggagggctggggacattgaaggtagtcagtaagttttgactgaatgaatgaatgaatgaatggatgaatgaatgaatggtcaggaaattggaatttgttggatatgtaatttgacagcagacttttaatgacacacttcaggttccattttccctttaaataaaataagaacagtgctacctatgaaacaggcagtacttaggaggattatttcccataatataactttgggtgtttaaaatgctattaaaaatataactaccatctatgaagctttgtatgtgttgagcactttattaagagctttatttttattacctcttttagtcctcaccgccacccactgtgagggaggaattattgatcctagtttatagatgacagagctgagtccagagaggctgagttacttgctgaggtcacagagctggtaaggcattgagcacagggtccaactccagggtgtctggttctaaaggcttcccatcatgccccattgcttctgagtgctgttaggtgcttcccaccacttttttaaataaaagagacagatatcaattttggagaggggtcttcaagatagaaacaaatggcaaaaaaaaaaaaagttggttatcaaatcttttaaaccatttatgtgatttagaaaactgtgaagttactcatcattagaagtgcactttaaaaaattctcttccttaaggttcagctcagtgtgcttcatggaaaaaactaaatgggggagcatgttttctttgggaaaaacaaaataggtaagttttagggatttgtagaattttcatttgtttagcaatggtgtacgtagtggtaatacacattcaaatgctgccttctcccagaaaccttctgccaattccgcacatcacttggaactgggtacctagcacatagcagacattcaataaatattgattgaatgaatgaattagtaccttctagcatttcacacatattgccttccagtatacttggttttatgtgaatgtgtgcccttacctattatagcataagcactagaagagcactggtaccctgcccacttctttgtaccccttatggtacctacctagcacagggctggaactgagtagatgctcaatgaacatttgtggaattatgctgtggcccccaaattattttgtggcccctaaagctttgcagctgagtgaatggcccattgaaaactagcacgatgatcagatggacttctctctgtctaagggcattgattgagacccacatttatattgagggtggaaatgtccaacaaagacaaagaaaagcatatttattgctttagatagaagtcatatttgtttctttcactctggaagatatagtcacataaggtcatgagctattttttcttcctacttaattgctagtctgtgggttggtgaaagctcacatgcttagcttttcagtgaaactttcacagtccatgtggctctgactcagaattttttcccctatctgcttcttctgttgccaattcattgtttatctcctttgtgttttacatctgacctattattttgcatgctgttttggattactgaggtagcaacatccaaatagtttctgtgtacattttagcttttgggagtcaggcagctgctctggggcctgtttgagtcaggtcagggtcagaaatgcccttctgcttttgtttccgtggaagaagttggcctggaactctctctgggcaccttctgcgccctctggcaaccagaaaagcaaagtcgttcatcaaaatctcagactggagcaactccttaaaacagcttccacagttcttgcacatactcctttcttgatttgttgcatatcatttcaggcacctcttttaatgcagctattcaggctgcctaaggcagtggtccccaacctttttagcaccagggaccagttttgtggaagatagttcttccaccgatggggtgggggtggtggtttggagatgattcaagcacattacatttattgtgcactttatttctgttattattatattgtaatatataatgaaataattatataactcacaataatgtagaatcagtgggagccctgagcttgttttcctgcaactagatggtcccatctgggggtgatgggagacagtgccagatcatcaggcattagactctcataaggagcacgcaacttagatacctcgcatatgcagttcacaacagggttcgctcctatgagaatctaatgccaccactgatctgacaggaggtggagctcaggcggtaatgcaagtgagggggagcagctgtaaatacagatgaagcttcgctcacttgcccacagctctcctcctgctgtgcagccaggttcctaacaggccatggaccagtaggagaccctggcctaagggaccaggacagtggccagtgcttttcatagcctcttagtacttctggtggagtgtctctattcccctcaattccctcctattccgctaggagtttgaatctgctttgcccagttctgtcctgccagcctttttcctttcactgaattgccttcactttttgcctattagctttgatctctttggaaaaaagggcactggggtattattactgcctctgtttgtttttgcaaatgcactatgatttgtggttggtcttttggctagcctgaggctacctgaccctccctcaacagccctagttcccccaggtcattctatagttttgcccatttctttaattaatgttggtgagagtctccgagcaatgaagactttttggatatggagagaagcagaaccagagggataccagtaattatgctaatctgagagcattaagtcttcaaatatacatttttggataagcaattctgttgtttttgaagtttggttgtctttttgtttctgggtggtggactataattttgtattaaggaaagaatgcctgcccttatatatccaggactggattttttttttctttttcttttcttttcttttctttttcttttttttttttttttgagtactcatgaaaggaaaccataagaatgtttgggtctaataatatacttgcttgtgtatgaagataaaaccaataataacattaataccacccttcagtggtgaaatgctttaacctttcaaaacaactccttttatgaacttactctatcagttggcaaggtgatttcagggctatctcctgtggtgatgatggatctgtgggagcttttctaattgtgtgggtgaatttgagagaccccatcccagtggttcttgttcaggggtgagtatggaatcatgtggggaaccgccatgaattacacatacccaggtcctgcccaggacctactgacacagtcctggggtgggggacctgcccacttggaaaacttcctgggacttcctcagctggaccctctggggattggggaaatgcattgcagtcacctgcctggggtagtaggggctgccacatctgtgactaggacccaaggagagtgatgatgacccttcttggaatcatgcagaacacacagtgacagtcccttttggaagctggccacaggctgcactttattcattattttaacagcaaccaaacatttgctgtgtgcccactggtggccgctagacagtcttcccaccctttagctcatgtagtcatttaaaccagttccatcactagagaaatgtgttactagccccttgaaggagagtgggccttcaactggattcaggagttgtggtctgaggagagtgattgatatggtttggctctgtgtccccacccaaatctcatgtagtagctcccataactcccacgtgttgtgggagagacccagtgggagataattgaatcataggagcaggtctttcccatgctgttctcatgacagtgagtaagtctcatgaaacgtgatggttttaaaaatgggagtttccctgcacaagctctttctctctttgcctgctgccatccatgtaagatgtgacttgctcctctttgccttctgccataattgtgaggcctccccagccatttggcattgtaagtccattaaacctctttttcttcccagtctcgggtgtgtctttatcagcagcatgaaaatggactaatagagtgatttaatgagtttcaccagcatgggtttctttagcctcggtttctttgtctgcagtatatgggctaatggtacacaccttgaggttgttgagggagaagagacgggctcaagtgctgcctttgtcttaccaaccttgtgaagcctccttgagcagccatgtcttcatttgtaagatgagaataagagcacctgttttatgggctttttgtaaggattgcgtgtgctcatgtaagaaaaaccccttgcaccctgcatagtaccttgcagagcaaatggtggtgataatgacaatagaaggagctctctttattgagtgcttactgtgtgccaggcactgtgctgggcactggactacaacagaggggaaagataggcatcgttcctgacctcactgcgcttaacaaagagaaagctctaagagaaagttttcaaagcattacccttctctgtatatttaagaggaaagctttaatgttataggatgccttctaaatatgtattttataacacagtgggtagaatgtggaatgtgtcttctgggagggaactggagttttgcatttcctgcctgcttgtgcttttgaatttgtggctgtaatgctgccctgcctgaggtttcagcagttaatatttcccagggcagcatgatgtcaacgccccgtggtctcttatctacaagaagggtatagccggggcagagggagagaaaggactattttcaaagcctctcttgaagactttgttgagctttaacttaaaattttcctcatctccttcctcaaacgtttgtgcttgatgtgcataaaccatgccagtgttttggaagattcaagtttgaccaccataaattggttcatatttccagcagggcagttatttaatttcctgttggaagtctacaaaatgttggcactgtttgctctttggcagaagaccaaaactcagtacagtatcattagcatgctctggtacatagattaaagcacgattgtctttaataagaggccatccctgtttaggatggggctttgggggctgcaagggtgcagggaagcacaacgagctttctaatcaaaatcaaagtgcagttactgggactcactcgagaagggttaaagggagggcagaattccgatttcttgtctcaatttcatttgtttgggttattttgctctagactctgggagagttttggaggccagggctggctggtttgtgggataccctggtttaagcctcgtgcttcttctgcattcctccctcttggcagtacggctcatgggagaagcccacctctgaagcccatagagaaatgcagagtgtctctacggaacccactgtagtaactgaaatgttataatggtgggcatttacagaggctctgttatcagtgaggcactttacatatgcatattcagcctttacagtaaccctgtgagatacgtattattattgctgttttgaggatgagaatactgagatgcaaaaagattaaagtatctgtagccagtgagtatctgagctggggttagaacccagttctgttccttggaaagattcttactcttctcatataccctaataagggcctggggaaggaaaggatctgagttttcaaaaaagcttgaaaatttgcctaacatgaatcttgggaaattatttctaggggcttcttaccagattagctctgtttttctttcgcagaggcccttcagtgttggctctttggtagaatgagcatagaaatgtatttttttcctacaaatattgtatcatgaaaaatgtcagacagattgaaaagttgaacaccacctacattctactattgctgttttattctatttactttatcacttgtttctccatctaacctctaagatctatttatatttgttagaacatcttttctctctgcccttctgttcctttgattgatggcaatggcctgatgggaagtaattcacaaaaccagagggaaagtacagtgcttagaacaatcttttttttaggaaaaagagaaaattgttcttatgtttaggtagagcccaaaatgggcatttttcccctcccctaggtctgttgtttaaaggatctgacagaaataattataatgaggctgatggtgaatacataaggtataacctattattactgtcttctatgcaccaggcatgatgctgactgcttagtaaccttatctcattgatcatttcaacattcctaatttacagatgagcaaacagcctagagaggttgatttctgagctgggatttgagactggtgtgtagagactatggtgtgatttctctgcatttcaaattatgcttccctatatttttgttccagggtctcagtgggaggccctagaaggttactactaataaggaaaaattgctaaagccctggaaattgaaggctaccagaaccttgtaaagattctctgggactagacctcattcctctgaggatccttgtcagacagtttccagggggtggggagatgttctgctctccccagagtgtcatagaaagtttctgtggctttcggaatttctcatgactgattcacatcttcttctccagcttagaagaaaatccaaacacttacctttggtttatcagttggttaatgttgttttcttttcatggtaggatcatctatggcctccttagacctatacaagtgacatcttttcttcctggggaagaagatggtttctgcaggcactgacttatgagggcaggtgcataccttttgtaagggatgaaacttgaaaaagaatgggtgctttttgatgtgtttatgcttgaacctgcttccttgttgagtgtgatcttgagcaagtcacataagcttcttaaactcttggcatccctgcagcagttattattgtgagggagatggaaaaaaggtatggatagagttctttccattagaaaatgtaatattcctcaggagcccatgaagaggatgctgctgaaaactgaggacatggcatagataggaattgctagagaaaggcagtagagagaagaaaaatacctgttggttgaaatagttgattggaggaataaaaattgcctggaacttaaagtttccttcgaataccagcactgtccatcagtagctgtataaattagcctctttggtcattaagtttcatcataaagtgggattattaatacctacatcatagtcttattgtaaggataaagtttacataatgtatgtaaatctcctaacagtagttcatagtacttggcgataaaagatatctcttagaagtaggaaatggggaaactgaggtacaccttgaaacctgagtaggatttggatgcgtaaaatggtccagttctgaaagtattttacaaatatcaccatggaacactatgcaggcatcaagaagcatggttgaaacccaaaactcttctttcttttaataaggcaaaggtggttaactttttgagccaaaagttccaaattgttcagtaaaatgtcattgataagatatcaaaatatcagatatcattttggttgaagctcaagttggcaagaaccaagggtggaattgctaagctgggtgacacatttgaagccattgtaatgttttagtgatctccacagggcacgtcattggtggctctccctgtccccctgcaagccctgcaatctggctgcattttctacacacttgtttggttgtttcatgaaatctacccccctgtactgctgcaggccacaaagaacagtgttcagtaaggtggattttggaaactgaagttgtgattgcactgtagaaggctttcattgtttgttttgttttgcttttagtttatggaggactgttgggagattaggagaaggaaaatgccccagtagaactgaaatcctagtctagcacctgaaaagagtgaattttgccttcttttttttctctgctaccttgcagtcatttctgctatatgcagattcaggtttgatgtgaattttgagtttagctggaattagttctttcatggccttggggaagatgtggataaaagaatgaacatactaagggttgacagtaaaattcaaaggtcaggtaaggttctgtatgcatcctctgcctggagtggttgtgtagtgatagtgttaggactttataagtctttttctcacatcatccttataacaagccttagagataagtattgtttttattgctattgtgcagatggagaaacagatgaggaatggagaagttcaataacctgtgtgaggtggtacagctaggaagtggcagagatgggacttgaattcaaatctctgacatgtaagcccttccagcaattgtggtggaatatgctatctctgttacaggcttctcttgtaacaagctgtgcttgttaatgctctataaggagcctctgggagcaaggaaaagggaaagattttttgtgttcactttgcatccacacagccctttttattctcaagattatgctggggggaggaagcactagaactaccgtgaattaagtgttcacattgtacctagattaaagcaaggtgctctgcataattctcacatttaaccatgctgtccttatccttatttcattgatgagcttcagaaagtcaggttccttgaccccagtttcacccacagaggaagttctgatggtgaaatttgaacacagaatgagtccaccaccttgccttcctcttcggttttcaatgacttctccctgacagtcctgcgatggcatttgtggttttaatttcaaagacccttacaattgttgatggttgatagcatttggtatccattggaaactgccaacacttttcactgctgcatttggaagaaaatcatagtgagttgatgtgttagtgattcaggacttctgggaaactgagagcacccgtgtgtacttatttggagtcaatactttatgaacaactttggcccaaaaggagaaaaatctgtcttctgaaattgagtgcaggtctcttagtggcttacctcagcagggagccagttattacataagctgaataccaggtccgtgggtttccctaacctgaaaaagaagcagcgtttgcagttatgaggaaaacagaaagacccatttctctgtggcatgatactgaacaggcagcttcagccgtgaggatattttggccggaggaaaatgtagcttaagaaaagtcccagctggttcaagtgacttaagcccagctattcatgaaatattatctgacagctcccccttctcctcaagtggctggggagtgagtcacaattgccccagaaacctgtgttctcatatgggattttggtattccaggtttgctctactttgcacactggacagcttcatgaaaagccatatttggtgcagacattttcttgtgatgataaaagcatttagtaaatgtactgggaagcttgccgtgatgaatccttttgttaagaaattaaccaacattaattttgaatgtaggactgtcccacgtgcccagcactgtgcttgctgatgtgggggttcagagattatgagacatgtgaaacactagaatggaatctccatgaaggcagcgatttgcctattttgttttctgatgaaactgtggtatatgtaacagtgtctggcacatagtggatgcgaaatagatatttgttgaacaagtgagtatgtctctgcccataacagcttacaacctagtttgcttgcattaattaatcaactaattattaattaatgaatgattttattcctttattctacttatatgagcatccagaagtcctcaattttattaggatatctttaattctttttattatttaaaaaggtaaacatgtgatgtgtttgttgtagaaaatgagaaaagagcaaagatgtaaaaagaaaaataattgagacaataattattttaatttaagcttatatcattagaaactttttccatgtaaatacctgattttaaaaaatgagtttaattctcttgcaagttgattttataacttgctttcctcccacttatcagtgttattgtgaacagctttccatatcaaaatacactgttctcaaatcatcaatttttaatcacacaatttagcattgtgtgtgattgcatcatagttttcttaatccctattgttgaattgttgggcattactcctctctctgtttcattagtataaacaatgctatgattatctgttaatttttgtgcatatccatgattattttcttggcaataaccctttgaagtggaattattgagtcaaaggtaaaagtcttttgatctacacaatcattgtggctaccataaaggttacagaaatgtattcccctctctgtgttctgtggaaataaagtggtttttttgtttacacataactgatgccatgtattgtcatttaaaaaaaaaacaactttctgggttaaaaaagggaatattattgttatttaagttaatatacttttgattactggtgatgttaaaaatcttttaaaatattttttgtcatttgtatttcttcttttgcaagttactggtttatatccattttcttactcagagactcgaggacagatcttctttccttggtccctcccaatccatgatgggacttgctatggaatttgtccacagttagccccagtaaatgttgaatcctcccatccacccactcattcatctacccactcacccatccatccatcgatttatatgttgattcattcaatgagtatggaggacctaatagatacaaggtttataatttaagatagcgctttgaaagtttttttgatattgctgctaactacagacattacttttttttttttttttttttttgagatagggtctcactctgccatccaggctggattgcagtggtgctatcatagctcgttgtaacctcagacttctgggcccaagtgatcttcctgcctcagcttcctgagtatctgggactaggagtccgtgccaccacacccagctaattgttttattttttgtggagataagggggtcttgctatgttgcacaggctggtcctgaactcctggcttcaaggaattctctcacctcagcctcccaaagtgttggaattacaggcatgagcccccacacccagtcaaaatcttaaacttttttttttttttgagacgaagtctcgatctgtcgcccagggtgcaatcccggcttactgcaacctctgcctcccgggttcaagccattctcctgtctcagcctctctagtagctgagattacaggcatgagccaccactcctggttcatttttgtatttttagtagagatggggtttcaccatgttggccaggctggtcttgaactcctgacctcaggtgatccacccacctcggcctcccaaagtattggaattacaggcgtgagctaccgtgcccagccccaaatcttaccttttaagaaaagacatattaatatgaattaatacaatgagcaactaatccaaaaagttttttttctcctaatgagttttcctttgggtaatggaactgatcttgtcttttctgtgcacccagcagggttgggtagacagaaatcaacaaatgttttctgtaaaagtctggatagtaaagatttcaggctttgcaggccatatagactctgttgcaactattccactctgctctaaaagcaggaaagcagccatagataatttgtaaacaaatgagcatggctttgttccaatgaaaatttatatatagaaataaaatttaaatttcatacagctttcatttgtcacaaaatattatttgtctttttttttcccccagtcacttaaaaatttaaaaaccattcttaagtttgtaggccatacaaaaatagacagtgagctggatttggcctggggtttgcagtttgctgatccctggggtagggtctcagaagcatgctttgaggctttgaggagctaatctggttttgcaaatttgctacaaacaaccccacaatggatgattcataaatgaataatagaattgagtttagctgaggcttggatatgtatcctacctcttaatgactggcaatacataattcttagtgtgttagcaatattttaagcttctaaaaatacttttattatatatttactcataaaaattttacagttatgagcaaagaaaaaacgctttcctatcctttgtcaatattttgatgtgtcttttttcagtcttcatgtatatatagggcttacgtatgtataatgtctttctttacaaacactgttgaatcctgctttatttctcttaataatatatggtaaatatttgtcagtgttgttgaatattcaaatataaactgaaaccacaataaaataccactacatacccacagaatggctatgattaaaaaaacaactaacaataccaagcattggtaaggatgtagagaaactgaaatcctcatccatttctggtaggaatctaaaatggtgcagccactttggacaacaatttggcagtttctttaaaaattaaacttagcatatgacccaggagctccagtcctaggtatttatccaaaagaaatgaaaacacatgcccacacaacgataggtatgcagatattcaaagcagcattatttataatagccaaaaattagaaacaacctaaatgttcatcaactggtgaatggataaacaaaatgtggtatatctatacaatagaatactatttagtaattaaaaggagcaaaataaagagaggctaccacatggataaacctcaaaaacattatgctaagtgaaagaagttaagcacaaaagaccacatattgtgtgattgcatgtacattacatttctagaaaaggcaaaaaactagagacagaaagcagatcagtgtttgcctcaggcaaggtgggaatggttagcgtcacttctaggagcagcagaacttttggggatgacggaaatgttttaaaagtcgaatgtggtgattgcacgactgtatatatttactaaaattattgaactgtacactaaatgggtgaatgttatgtgaattatacctaaatataactggtaaaaatattctttgaaagctgaatttttaatagtgtcatattattccatcatgtgaatgttttatttctttatcctggatgacttgggagaaatattcagtgtttatttccttttacgccaaaatccatattcagtaggttcaatttgagccattggacttaaacaagaatgattcagaggaatgaatcccaatccagttgtcaagaaacctagcgtggtctcaatcctgcctccagctgggtggacctcagttccctcatctataagatctaggacagaaataaatacaaggaaatactgggttccagggaatagaggattagaaatagaaaacatagtagtggcagtaatgaataagactgatttccctaaaagtaggaggccaggcactgattatttttatttttattttttagcttttaagttcaggggtacatgcacaggtttgttacctaggtaaacttgtgtcatgggggtttgttgtacagattatttcatcacctgggtattaagcctaggactcattagttatttttcccgatgctctccttcctcccaccctccaccttcctatatgccctagtgtgttgttcccctctatgtgtttatgtgttcacatcatttagctcccacttacaagtgaggacatgttatatttggttttctattcctgagttagttggctaaggataatggcctccagctccatccatgtacttgcaaaggacatgatctcattcttttttagggctgcatagtattccatggtgtatacataccacattttctttatctagtctatcattgatgggtatttgtgttgattccatgtctttgctattgtggatagtgttgcaatgaatatatgcatgcctgtgtctttataatagaatgatttctattcctttgggtacatacccagtagtgggattgctggattgaatggtatttccatttttaggtctttgaggagtcaccacactgtgattcacaatggttgaactaatttacactcccaccaatggtacattgtggagaaaaaggaatgctttctccacaacctcacaatggtacattgtggagaaaaagcattcctttttctccacaacctcaccagcatcagttattttttgactttttagtaatagccattctgactggtgtgagatggtatctcactgtggttttgacttgcatttttctaatgatcagtgatgttgaactttttttcacacatttattggccacatgatagactggataaaaaaaatttggtacgtatacaccatggaacactgtgcagccataacaaggaatgagatcatgtcctttgcagggacatggatggtgctggaagccgttatcctttttttcataatggttgctggctgcatgtatgtcttttgagaagtgtctgttcatggcctttgtccactttttaatggggttgttgtttttttcttgtaaatttaagtttcttatagatgctggatattagacctttgctgggtgcatagtttgtgaaaattttctcccattctgtaggtagtctgtttactctgtcgtagtttcttttgctgcagagaagctctttagtttaattagaccccatttgtcaatttttgctttgttgcaattgcttttggtgcctttgtcatgaaacctttgcctacaggtgctgtttatttacacccctgtcccaacctcaccccactccctttcttttgctggtgggaagtcagtaagaactgtgggtggggttctgaggtaatcaatacaaagaagaaggtaagaaattggaggggactcaggggagatggcaatgctgacaaggggttggatggaatttgttctgtaaactggaagcattctgcttggcctcaacacttgccaaggcgttgatgacacacaatttggatgatttaatcaccaggaaactatctaggtttcttgttctgaagtatgagaggacagcctattaaaggaagaccgaggctggatattgccatgaaaatagtaagttttcacgtttggcttccgaggggagagctggtgccctactcactgcagggaaatttaaactgggtgaaactgaactggtttccaattgcttgtgttctccatttccagccaagttccaggttttcctagagtacagccaggagcatctgcacctagagaacacagaataaaattgtggaaaccaaacttgtaaatgtttttctcattagcttcaggctcccagccaccaataaactgtaggctttaaaaaatcctgtattattttgcaagttaagagaatgtgcatattccccttatttatatgttcaggattttcttaaaatgttacacatcaagcatttatctgctaagccaccccaaaaggtaacagcattctagtttttgtacaaaagagaaaaaaaattccacttaataaacttgcagtaacttgagcctgttggtggtcttggaggaaacccaaatccaggtttggttgatactgtgtaatgtgaatgcaattagtagcggtttttctaaagtagaaagagatgtagaaaaataatgcatagcaaatttaggtcagagctgggaagcttataaatccttatttttgttttcattactttaagtaatagggcttttgtctttattatgtaatttccctagcaataatatgttttaaaacatttttctgttaatttcatacatttgatcagaaagccacagttcataaacccctgtgatgtggcagctgtcactgtttatatatagaggatgacttcttgttcatccctgggaggccaacacaaaaattactgatgggggcaactttcactacctgttttttcatttagtagaaggtttgcaaagcagttttcagttgatcaacatcctcctgataggctaaggagtgaactgacctttacatgcatggtttatttcagagcatgttatttgattccagcatatttaaacctaagcaactagattgtaaggtctgtaaaaacagaatttgtctttctggttttttactctattcccctggcacatagtaggtgttcaggaaatattagctactattctcctctccaagatgcagctgttcctctccagctgtcctgtccttgctgctcctccttgaacttgccaggctactcctgcttcagcactttggagaccacagaccagcagggatcactccctctcctcttctgggtctttgttcagattataccatctcagtgaggccctaactatctccttcctttctttctttatttttccatcatatcatcgccatctgataaactgatatattgatgtactgatatattgacttatttatttgggaatgtgagctccaccaggacaggtgtttctgtctgatttggttattgctgtatacctagtgcctagaacatagttgctataatttacttggatgttccgccacgtactggctgtgtggtaatagctaatgcatttgctcccttggatcctttgtttgattccccatttgtttcatatggcatatgtgggtcagatgagatgttgcacatgaaagctcttttatgctatgtgttatgcaaatgtattcacttatttattcatttaatcaaccagatgcagttcctgccttcacagagcttaataattggacaaataagtaatttcaccaaagtgggaatgcgggtgatagggatagtgtgatagggaatgtgcagcgtgctatgggagcaccgtcacgagggattcctaattcagatgtggggacaggaccctggaaggcttccaggaggaaggaacatagaagctgagatctggggatggaatgggcattcaacaggcgaagggagtgtgatgtaattgatggcatggagagtattgcaggtaggaggaataatgtacagagtctggaagtgcagaaccatagagtactggtggaactgaaagtaattcaatctttctggaatatccagtgtggggacagataagtggatagggatgtggctcgtgatatagtctggggacagatcaaggagcgctttgcaggccatgctggggagcttggacttgatcctaaggacagtgtggagccatggaagtcttccaagaaaggagtgacttggtctgactttcattttcaacagtcattttatggagtaagacagcttatttcctcgccaaggaacttgaacacaagctcccaggaagggaggttgtgaaaacagtgaaagggccttccagaaagtaaatccttaagctccatgaaattagcttaaattctgtttgaatctgactggtgaatatcatagcaatgaggccaaaaaaaaaaaccttcataaaaacttaattatctttgaggccgtagctcatacttgagggaagggacatgggtaacgctagagacatatatgtttgcattaacttttacgccactgtggggcagacaattaaagcaggagtggaggagtcagagcagttttgaatctgcttttaagtcccagagagtgtcacagtacctcctacccagcactggttgccaaagtaaaagaaagtggtaacaatagggcataaggtggtggagaagaggctgggtagaccttggccatattcttgctttgcaccttacactgctataaagaactacccgagactgggtaatttataaacacaaaagaggtttaattgactcagacttctgcatggctggggggtctcaggaaacttaaaatcatggcagaaggtgaaggggaagcgaggcatgtcttacatggcagaggaggagagagagagtgctaagagagaagtgccacttttaaaccatcagatcttgttggtttaaaacaaccactatcgtgagaacagcatgggggaaagcacccccatgatccaatcacctcccaccaggtccctcccttgacatgtggggattacaatttgggatgagatttgggtggggacacagaaccaaaccatatcattttactcctggcccctttcaaagctcatgtctttttcacatttaaaagctaatcgtgccttcccaacagtcccccaaagtcttaactcattccagcattaacccaaaagtccaagtccaaagtctcatctgagacaaggcaagttctttccacctatgagcctgtaaaatcacaagcaagttaattacttccaagatacaatggggatacaggaatttggtaaatgttcccattccgaataggagaaattggtcaaaacaaaggggctgcaggccctgcaccaagtccaaaacgcagcagggcagccattaaatcttaaagctccaaaataatctcctttgactctatgtctcacatccagggcatgctgatgcaagaggtgggctcccaaggccttgggaagctctgcccctatggctctgcaggatacagcacccctgacacacagctgctttcatgggctggcattgagtgcctgcaccttttccaggtgcacagtgcaagctaccagtggatctaccattctgggatctagaggctggtggccctcttctctcagctctactaggcagtttcccagtggggactctgtgtgggggctccaactccattttccccctctgcctgccctagtagaggttctccatgaggactccactcctgcagcagacgtcttcctggacatccagacatttccatagatcctctgaaatctaggcaaaggcttctgaagctcaacttttgtcttatgtgcactcgcaggcccaacaccaggtggaagctgccaaggcttggggctcccaccctctgaagcaatgcctgagctgtactttggccccttttagccatggctggaactggagtggctgagactcaaggtgccatgtcctgaggctgcacagaacagggagtgcaggagggacccctggcccacaaaaccagttttcccttctaggcctctgggcctgtgatgggaggggctgccatgaagatctctgaattgccctggagacattttccccattgtcttggctatcaacattcagcttctctttatttatgcaaatttctgcagctggtagcttgaatttctccccagaaaatagatttttcttttctacaacatggtcaggctacaggtgttctaaacttttctactctgcttcccttttaaacataaatcccaatttcagaccatctgtctgtgaatgtctatgactgtatgctttcagaaaaagccaggtcacatcttgaatgctttgctgcttggaaatttcttctgccagatatccaaaccatctctctcaagtttaaggttacacagatctctagagcaggggcaaaatgccaccggtctctttgctaaagcataggaagagtgacctttgctccagttcataataagttcctcatttccacctgagaccacctcagactggacctcattgtccatatcacaatgagcattttggtaaaaatcattaaacaagtctctaggaagttccaaactttcccacatcttcctgtcttcttctgagcccttcaaatttttttattctctgcccgttacccagttcctaaatcacttccacattttcagatatctctatagcaatgccccacttctatcaggaccaattttctgtgttagtctgttttcacactgttataaagaactgcctgagactgggtaatgtataagcaaaagaggtttaattgactcacagttctgcatgggtggggaggcctcaggaaacttacaattatggtggaaggtgaaggagaagcagtctcctcccttgacatgtggggattacaattcgagatgagatttgggtggggacacagagccaaaccgtatcaaccagtgatgtggctttgggaatcacttaacttccctgaacctctgtttccttttctggaacatggaattagtactactgatttttcagtgttgctaggattcaatgagataaagcacagtcagtgctgctataacagttgttttgaaaacacacacattttttcaaagctgattgatgtattcagaaaaatttgagaataatgcaaattttatgtttacttacatagtcagttttatccacgaaaagtactaggtggactcagaagacggcactcagctaaagtgagatgcatggcaatatacaaacacacacacctgaaacatctaccagctcctcagttcaccaggtgtgttgagttacactcgagttacactcatccacatctgccattacaactttctgtccattttctgataaccagccccccacccaccacttcacaataacccataagctgtaacccttacaatgcccatttccacaagaaagtagtagtgtgttccaatcttgttttcccataaactctgctgtttttactgcacaattttgcatagtgtggtgatttctcagaactcatatgttgtgttatagcagaactgactctgtctaacacaattcctggcagacagcagacactcagtaacaggtagctgttttattattaatattaatccacttaagtacaattgtgggttggggcagggatccctagttacaatgtttagctgctttgattagtagtgttaagtgaaatggactgcctgagtggaagggttttggtgcttttatcttttctaagtgtgtgctggtcagaccacccttggggtattaacagtgacaaaccaggtatgtccagaaaagagcaagccagaaaaggagaagacatgagaatgatctttaaatagttagagggccatcttggaagaaggattgctttgttttgtgggtcttcagggtgacaaggggaagctcccagggcccagggttctggctagctcggggacgagcctcagaatagtccctgggggtgatgtgttctccaagctctgattggctgctctgggaggggagaggacagagaagagtcaagcacgggtttggaggttctatctataaagttccttttcatttttttttttccttcaaggtagtgtgcaaagacagattctgctgatcagagtaaatttcagacagaaacaacccaaacttttccagcagtatttggacttctgcttgcctgcttgcgtttttttttcttttgggtgatctaagagaatagttagcacatgtgcatatttacgcactggttttttttctagttatgcccttgaatgttgcaaatataaagactatgctttacaaatatttatggcttctggcatgcttaggaatagtgaaattacatcaatgctttccgtctcgagggcttttttttgacttttcttcttcttcttttttttttttttttgtttgtttgtttccaactcagggaaaaagctcagttagttactgacctggcattgctttctctctaacatcctgtgtagcttttgtcctctccatctaagcaggctgttaagctcttgtagtaagaaagatgttaccctgggcttagaccctctcggtggagctgagatggagaagcctccggaagcatggggcatttgagctgagggatggcaggatctgcttcagatatttaaagtgggttactctgagcctgcaaactagagagtctagtgtggtgtctctagaagaattacttttgtacccttagatgaattaaaaagtaattatactgagtgttttatcttgcctgtatacggatgtataagattccaggtttctagttgatgttactgttaaaaacagaagatgttcaaacatatttgattttattaaattagttttccctgtagtcataggaggggtactgctgtttacatgctgaatcttagcaaaactataaaatagcatttttaaaaaatggcagctcttctgttctgatgctttgacaattaatgttatctctttttgtttctatgatgagcacatgggacttaggcttactcttaaaatggatttttccaaaaccaagagttattacatttcttcctctgagacaaagtattcaggcctcctcctcttctagcactcagtctggaaaatgtggttagtctttccatgtgggagctcttgtgctttgtgcattggttccaagatggcaagtggactactgttccaagatctgggcccaaggcatgtcgttgggctcgcctgaacttgtatataatgaccagaaggaattggtctgcactgccattaccgccagccactacctgatcaattctgcttgggaaatggctctaatcaacattcttctagacctgctgttcatggctgcaggtggcaggctcatggatcaataattggctggggcggttggccccactggtcaacctcactccttgagccctatttacctgttgctgcctcctccatcctcccctaaagtcacacagcttcaaataaggtggtcccatctattttggtgctttcccttctttcttaacctcccataatggaaaaagcacaggttccagaagcctggttttaaatctcagctctgttatttatcagctttgtgattttgggcaagtgacttaatctctctgagcccttgctcactcattttaaaatgatgtcactcatccctttcagagctgttaagaaaacatcatgcaaaccatctggtacagtgccagacacagagaaagccttctggaactggaatccacacacaccttaccaattactttttgagtaggtcaattgccagcatgtctccagagcaaaaagattagatgatcctcctttctttttgtgccaggttctgcccaggcccaggggctgcagagatgagtaagaggaagtccctacctataaaggcactcccagttttgctaaaatccatttttccaacaaacgtattttgatacctactgtgtgcaaaatttatgtgcctttggggaggatactgagatgattcagtcactcatttattcatcggtcatcagtcgtgtgccagatactgttagaagcactatgggtagaaacaacaggcaagacattgtccttccttttgagaagctcatagtgcagtaaaatatactaaagtatgggagaagtagatagaaagagaatatgatctcattgttaaaaggcacttgtgttgttggacaatatagggtgcacacagtaatgtggatttcatttttgcaagtattcagatcttgatagagcttcattgagacaaccgtctccttttagaggaaatggagcttgggagtggttaatacgtcacacatttaggttaaagtaaagctgacactagccccacagaaactttaatttgtgtagtgactaaagtgaaaacactctctttcttcttgattctattgtctcccagcagagattttataatttgaaaacattgttccttaggtagccccaagaggtagattttcagatttgctgcttgctttttgtaaactattgcattccttcctcccaatagccccactggggtcaggaccattttgaacttaaagaacttgctcaaagttacacaacttgacatacaaagtcaggatttgaatccaggtttgcctgattccagagtccaagccctaagcctcaacaccatagtccgtccatgattcacactcattgtagtgtctgatggcttttgagactttgtagaaaaaagcacatcttaaatcatttttaggacctgtttatctgaaccagtggaaaaactaaatttacgaaccataaatagtgtctatagatgtggaatgccaagtgagttaggatatattaataaataggaacaaaaagttatgaccaaaagttgtgttttcctatacccagtttcttaagatttcataattagcaggggggaattctgagttgatgagtataaaaaggcctctgcaggtagcccaagagacgatactaaagtccagaggttataaacagaaagaggaacagacactgtagatttttctctactccatgacttcttcttgcagaaattctgcacttggcactaatcagacctaaaattaatttcttaaaatcaccaatgccttatttaaagaggttaacattctgcatgtagctgctccactgccaaacaaaaacacccctggttcttttgtgaccactaatgcaattgactttccatctttttaagaatgccccctcctatccctccatctttgtctcccaattaatttatgtttattttgtaaaaagcttgtgggcctgttgagttgatattgctaaaggctgacaaccacatagaggtacctcttatagcgatgaagtgtgtgtgcgtgtttgaattatctgttaaccagcatcaagacatcggttccctgtcttggatgaatggcaggggaggctgagcttaacttggccaaagcagcagggggctaatagaatgtttctgttccccataaagaaaggtagtcaagcgtctgtactttccactgaactccagtttctatcctgctttgaaaattctgcttaccctttcagtgagagccacatgacaagtgttcagtatgtcagatttgttttcattttattactacgtatgaatttgacctccacagtagggctgcattcatttcccaaagctcttccaataattgtattcttttaaaaaatatgcatactattattctttttcagattgtgttatggctggtgttttgaaagtggttaaaggatgactggttgcatgtggagtaatgtgtacatgatgcacatttccagatggaaacagccctcaaagttccctatgtagtttgtgtacctattctactcatttcattagactgaactcagtactttctggccagtagagcaggtttttttctttgacaaaattaaatttggataaccttttctgaaaagcaatttcagtgtgtcatattgacatttatattgataattaattgtttgtggctgtcaaaagaaagtgtgtatctttgcttgaggccaggagttccagaccagcttggccaacatagtgagacgttgtttctacaaacaatacaacaattagctggacacggtggcgtgttcctgtagtcccagctacttgggaggctggagtaggaggatcagttgagcccaggaggttgaggctgcagtgaaccgtgattgtgccactgcactttagcctgggtgacagaaacgagattccgtctcttaaaaaataagtatgtatgtaattgtgtatgagctaagttactcttcctgtcacatttgtatggtagctacagtcaggcactgcataatcatctttcagtcagcgttagaactgcatataaatggtggtccaatagggttataatggagctgaaaaactcctagagaggctgtagttattgtaatgttgtagtacagtgtattactcatgtgtttgtggtgatgctggtgtaaacaaacctgccctgccagtcctgtaaaactatggcacctccagttatatgcagtatacctaattgtataatgataatagtaagtatatttgtgataatagtaagtatacttgataatagtaataaacaactatgttagtggtctacgtatttactatactttttattattattattttagagtgtactgcttttgcttctaaaataaaacattatctgtaaaacagcctcctgaaggacctgaaggcaggtccttcaggaggtatttcagaagaaggcattgttatcatagcagatgacagctccatgcctgttattgccccttgaagagcttccaggggacaagatgtggaggtggaagacagtgatattgatgatcctgaccctgtgtaggcctaggctaatgtgtgtgtttgtgtcttaatttttaacttaaaaatgtttaaatagaaaaaagcttatggaataaggatataaagaaaatatttttgtacagctatacaatgtgtttatgttttaagctaagcattattacaaaagagtccagagttaaaaaaataaaaagtttataaaataaaaaagttacagtaagctgtccaatttctattgaagaaagaaaatactttataaatctagtgtagcctaggggtacagtgtttataaagcctacagtagtgtatagtaatgtcctaggctttcactttcactcacactgattcacccagaacaacttctaattcctgcaagctccattcatgataagtgctctctacaggtgtaacatttttaatcttttatactgtatttttactgcatcttttatatgtttaggtatgtttagctatacagataccattgtgtgacagtcgcctacagtattcagtatggtaacatgctgtacaagtttgtagcctaggagcaataggccatatcataaagcctaggtgtgtagtaggctataccatctaagtttgtgtaagtacgctctgtgatgttcacatgacaacaagcatatcaactaagaatgcttttctcagaacatatctgttgttaagtgacgcatggctgtaattcatgcattaattggttacttgtaccctctgtttagggcttcaaaagtcagatctgtccatctaagatgcttttaagtaacatttaccttaaagaaatagatggttgattggtttaaagaaagagacagctgaattggacggggaagccagattttgaccatatttctaagaggagctgttctgtaatgttttggtaaaagaatgtctgtctccatatcatctatctatctatctatctatctatctatctatctatctatctatctatctatctaatttggcatctatttatccattaatctgtctgtaatacaaatattccaaacatttaaaaagtataagaaggctctgtagtgcaatggatagcacattgaactttttttttgtttttatattggcttattgcaattaaaaaaggtgcaaataatatatgtaccaaagaaaattcagaaaataaagaaacactgagaaagtgaaagactagggctcatattataaacacacaaaaaatcacttttaatattttgggtacatttccttgcaggcttttttgccctatgcatacatttttatccataaatgtaatcatcttgtctatgttattttgtagcaagcttttttttcacttaatacataatactattttttccaagtctttatagatattgtttttcttttcttttatttcttttatttagccatcactcagtgattggatatttagggtatttcatcattattttctttgaaaattaaataaaacaaaatttgatgaaaatccaaggtggcccaacacagtggctgaatatatctcatcagtctgttacattattctcatggaaatggaaaaacaacccccaaaactctgcatctgagaggagtatatattaagcttaaggaagtgcttatgaacagtaggaaatgagagttggtaaatggagtcattttatttcataaaggtgcctcagagctttaagcccaaagccctacactttgagtcactttggattttgtgcatccatccatgatgcactgtgattttgtcttacactgtgtttggtatgaagcattaaatcttcctccctttacagttttcagaatctgtgaaataggacctgagctaacctagaaaagtctctctgcttgtcgtttagtttttttttttttttgagatggagtttcactcttgttgcccaggctggggtgcaatggtgcgatctcggctcactgcaacctctgcctccggggttcgagtgagtctcctgcctcagcctcctgagtagctgggactacaggtacacgccaccacgcctagctaatttttttgtatttttagtagagacagggtttcaccgtgttggccaggctggtctcgaactcttgacctcaggtgatctgcccgccttggcatcccaaagtgctgggattacaggtgtgagccactgcacctggccttgtttagatattttaaaataatcttccaattctgagtaaatagtatttgtataatagttgtgagttgaaggcaaatagtttcaaagagttcagttcttttgtcttcaacatataagtcataaaaatgcatgattctccctgaggagccagcttggcatcagactctggagccagacagactgggtttatttcctgccccaccactttctgctgggtgaaccggagtaagttacttgacttgtctaggtgtcagttttctcatctagaaaatgggaataatactattcattcataggtttgttgggctggtttaaataagttaaaacacagtgttaactactactgttttcaacaggttcctaagggtctgtgtttctagcgctttagcacttcaatggcatttataatgttctgcattatctctaactgagtggtttttctatgagtatttctatgagtatttcttccccaactagtttatcatgatggttataatactggccaccatttttgatggagtattataatacatactctacatgtattacaaaatgtacgtctcattgccatttatgaggtatgcattttcactgttttctttttacaagtttagtaactaaaggttgtagaggttaagtaacttgctcaaggtcataaaattgctaaatgtggaacttggaactaaattccggtctggtgtatgtgccaccaccctgcttttgtaaattcctttaaggaagggacttttgtgctttttagatcccttacagatttcagcactgttccttaaacatagtaggtcctcagtaagttttttgttatgttgaatgaatgaaggtaggagtgatcctgtggataatagaacttttttctccaataagaaaaccaacaatattgctttttaatgacatgatattatgagtcttagaattctgttctgcttccatgttacatgtaagagtttgtaattatttgtgtatgaaactggttgtatttcatgtgaaacaaaagtacataccctgtatttgagactctgatttgagaaaacctggattagcattacacaagtaaccattgaagcaattttaatttaaataaaggatacaactaattctggatctgtttttagccatttatttaacagacatttattgagcatatacattgtgcaaagccctctgcaggggactaagggtttaaggatgaatatgatggtttctgtatgaaagaggattttatccaatatcatgggtttacctatgccctgatgctaatgacccctatatatctttaatccaactcttctccttttgccttcattattcagctctatgttggatacttccacatggatgtctcataggcctccaaactgaatttattatctcatccccagcacccactatgcctcattatatattacattcttgtacctgttatatatttcacctctgttggtgacaccactgtctaaagtaaccattcaaaccactgtccaaacttcaaccttcaaacaaacaaacaaacaaaaaaaccagaagtaatatttgattccttttttctccctaacattctacatttggccattcaccaatcctactgatttttttcccctaaatatcatcaagaactgtgaaggatttgagactttatcttacttgcaaatgaacttgcctgccacagttccatagatgctggcagaaggattcgtgggttagagacaaagaaatttattagtcatagcaatagcaatagccagagtatcaacatatttattcactgtttctccaagacccaactcccataggatgtcatgaagagggccaggtgacatccatacatgaagtgcattgcgttacaggagagaaactctgaacttagggaacccaaatcttttatattgggcaacaaagatgcttcacctttgctccagagggagatcatttcttccaaggctgctctccacataaacatctttgaaaagttagtctggaaccaagggcagccagtgctttgctcacaagatgtgcagaaacggaagggactcatggagaatgtctcccaacaaatatatcttgcatctgttccctttgctccttctttttttttttaatcgaaagtgccttactggtcctgcttccatgagtagcagtgaccaggggaaaagggagaggaaccagccagcacagggaggggtcatctccacaacattccatttatacacagaactgaacagcaagcatagagtcactattgtggttagaagttggcagcatgggaagggggaggaacaggttggatgtgggggtgttgttaaaaatataggcccctctccacaactggggtgcctggggggaatttggtttgcttcaacccaagaggaataagaagatcaaaagcagtttggcaagaccagaaccgtcagggatggagggaggaggaaaatccagggagtggggggatctgtttggcaactggagtgaagggattgccctccccctgctgggatccccccagcccctctggtctgggaggaaggggacggcctgcaacccccgagggcagatgtggggctgccagatgctccaggcaggtggccagaaccggctcacaaaggcttgtcctctagggagatgaccgcactgccccccagcttctctgccagggtgcagcggtccttgacctccttgtagcagtttgtgtgtaattcatgcttgatccctgtcagcttcttgacggcgtccttggagctggcatagatcattttgcttttaaggggagcagactcagggacccagaagataaacaccaggtcctcctccttgctctccttggtctcgtaggttgtgtcacagagggtgtagtggcagtccttatctggcagcatcctgacaaaggtggtgtaggggtcgtcgatggtctggctcacatcgcccaccaggatcttcttggtctcctccaggatgatgttcttcttgtcctcactaaggcagaagagcaccaccttcttgagcttcttcacctcctctggcattgaagacttatgcaacttcatgtcgttgaacatgttcatgacaccatcagacagccacaccagaggccatgtttccagaagtgaaaaggagagggcatggagagccgcagaagacaagagcactgcagccgctgctgggacccgactgcactctgttccttctttgcaccattagatcaggctgcacattgctcataggaagattgcaacaactttttagctgatttccctaactctgggtgggtccctcttcatattagtcctccacaccttgctgaagtagcctcctgagacataaatctgactcttccctgcttaaagccatttactgcctgcctattatctataggaaaggcccaagctccttagcatgacaccaaagggattttcagaccagcccttgctaatccctctagccttaggggggcagcatatcagagtgattatctcccttactctcccagtgacttaacctttgtagcctgtttcctcattgctaacattaggatgataaaacctacctcatgggttggtgaggaattaatcagctcacacatggttagccctcagtaaacgttggctgttatggttgtgtctttccactctctgcctcgcactttaagatctggctacatggttttctgctgactctgtgtcccttttcaccatggttagtgcctttattcctgccacccactcttcttgcaatgtcctccaaaccctgttgcctggcttcacgctggttaggcacatcctcttccttctcttggatgctccatgcatgtgtcggccattgagctgtaaatatctactaataagtcagttactgctgctagactatcaactttatggggatggggggtgttttatttatctttgtgttgctagcacatagcatgtgttgaaaaaaatggtgaatgaatacatgaaagaataaaaggaattcacagtctactagggtgtttggggtctagggatgaagggtggaaggcagctaagtagcttaataataacaggttagagaatctgggtaaagctggggctgaggtgagaattaggccctataggagtccagtgtagggagtttgcttgttgagtgtggtgcatgtagtgaggaagcctgtttaaagttatctcctcaatgaaataaagcagccccttctaggcaatcctaattactccctttcctgaaagaatatattgcaaatggaaggtcatgcaatctgccttcttgtaagatcttcaatttctcagaatacaatgaattctctattacctggaggaggggtagaaaggagcttctttttaattaaattgtctctgcagcagaaagtgactttatcctgccttttgaagtcttccagttgtcctcagcctggctcaaatcactctccttgaattcattgttacactagtgcaccctgctttgtgagttataatttaacgtgagcgtatctaattctctaatgagatggagactctttgggagtttatgtttttttccctgaaatgtttaatgtcatgcttttgaattaagaagggcttctacatatatttatagactggctgagtttctccatatatgtgttaagaactttcaaataattagagcacagcctgaatttcagaatgccagtgatcttctccagggcttcagcttccctgaaagaacagctactcagggcctattattaaatgtttaaggtatcattttttaactttgaaataaaaactgaaatatttggaaaatactgataaacgaacaaacaaaaaaacctgaactaaccctactagtagtagtggtaactactatacaatagtatttggagtatatctctgtagtctgtcttccttggctttgtgtctttgcttctctttctctttcaatgaatgaggtcatcttttatcactcatctggcaatctgctttcttctccttaacatcaatagatatttattaaaagtgatgatgctggagtatttcttttaggttcctgtttcaatccttgacccactgttttgccttgtttgccactgcctgccttttcttgatttctgtttgtctctctggattgacccattattgtgttctgatctctgatacctgcatgcatcttcatagtaacttccaacttttgggagtgtctgctgtgccccagatagttgtatgtgttttacctgctttaaaaatctcttttcggatagactggatatttgtagtctccatgtcacagatgaggaatttatttggtgtagagatttagtaatttataaaagatcatgaagcttagatggagcctgaacttatgtttttatactcagcaccccctctagtatgtgaaactgtcatctttagcttctgactccttctggaatactgatttttgggtgctgtgtctaatcagctttcagctctacaatattccttgaagggcaccgcaacccacaaccttgggccagcatagtgaattttatattttttatttgacagagagagagagaatgtgtgtgtgtgtgtgtgtgtgtgtgtgtgtgtgtgtgtgtgtgtgtgtgtgtttgagaaatcagcagctgtggttcttgctttcactcctcatggtgaggaggtggcctacccctcacatctgttttcagcccctgttcctcaataccagagttattttctattaactcaatgcaccttttctttgtaattcttgtcaattttccctccagccacctgcgcggtctctggcttgctctcaggctgtgagtaaattctttgtatacttgctgttttcgataacctcagcccaagacttaatgtcaaggtgggggccctattaaagatgccatgaatcatcttgtctttgtttgaagatttccgtgttggcaagtgggcagatagatgtaggtttcccaaccagatgtactggtagctgagatgggggcattcagctgaagtacattcctatcattatttggcaaagaaagagccactgagattaaaagcatgatccttgcttgtgatctggcttcatcaacggaatcacagagcctctgtgttggaaagggccttgaaatcatctgcaactgcgcggcttgatacttgagggaactgaggcaatagatacaggaagtgatgtaaagttataaatgccaaaccttcaagggacttttgacatgacgtaactctgcgctcttatgttttgggggaagaatagtaaggcctctagaagctcactaacactcctaatgcggcacagcgcgttactgcagagcaaggactctactgaccacaggcccaggacagcggccttggaggtgaagtcactaagggggatctgtaggatttggctggttacaagagctcacccgctatctcctccaggctggcttccgtgggcctctgttgaactatcagtccagtgttcttgcctctgtccccacagccctgcagaggtcttcttccacctgacagatggtgactgccttctccacagtggtaggagtgagggaaacagtgaggggaaatcaggaaacaggaagccagggagaggagcaagaggtgttggggctgtatgtgctggctccgtgccttggtgttgtgggtttctagagggttttaactttgtagtaaagacgggacttggaggaattctccctgtggtgggacaggagttttctccacagccttcacaaagtattccccgcaagaactactcatccttcacggtctacttctatcgtagcagttcagtcttctgctgtttcttctggtaccagcctatggattgggtaaggagaaagatcaggtttgtaaagagatctttctggtccttccagtaataaagccccttggacaagggccagggagattcatctcccagagactcctgtgctctaggtggtggtagaggcttcctgccagaaggatctgaggcagaggacgtggatggtgccatgctggcgtctctgtgcatctggcagcgcaacaaaggacttctgtctgccctgcgaggctgggtcggtaaaacccacttcaattgaaagccaccacactttagcaacttgataattaaaattctaatatgtgaattaaagaaaacaaggggctgtgttcctgccatattaaaatacagctgcagtgattccactattgtttcctttgacagagctgtggttttcctacacacctttgtttgaggctttgattcagatatactccctgctgctgataagtcccatgtgtctactcatcggttagatggtgcatggggatgattcttctgtgatgtggagaatgaaagatcgtgtcttcaagttatgtgaggtggctaagtgacatctcatcaagagcagagataaaaacaaaactcatggaaaaggtacttcctgagctccctttttgtttcctaagtgatttaaaacaataaaggccaaatcgaagagaaaacttaagaaccgatatagctgatacctggacttacggattgatttatttctgtgaacactctgggaaaatggccacttgtcgctctctgttattaataaagaggtcactttatcattaggcctttgaatctgtatttaatggctaaagcagatggttataatttctgacttggtgtggccaccttattaataaaaaagaactgatggaagcaaaaaggcgtcttcatttttaactccagaagcataacacaaatgctttccagtctttctttgtgtggagagcagaccaagtgactgcaataagatcctgttacacatttgaaaaaaagacttttgcagagtggaggtaactcagtttgaatccttcttttgttaaactttaaaagaacactataaatatatgcccctttccttgaagaaggtatttcgaaggaagcttcaggattatattttaaagtaaattaatattttaataacataaggaaactaaaaaacacctaatttatttcagatagtggaggcctgtggtactttctaaaattattctttttgcttaaactactataaactgcttttttggatttaattactaggcttagatgaatgtgccatgcatcttattttggttctttttaaattcacttggaattaaaaaaaatcaataatggcaaaaacgtctggtagtggatttctgcttgatttcatcaagcctgtatattcccctataatggtaaggagtttgaaatcgtggttatcatcctggaaattttttgtccccaaagggacaaacctacatttgtgaagacagaatgatttagaatcttaatgtactcagtaaaccgagtgaacagagcagaaaaatgctgggaattcttcacataggctcagaagagctctttaattcacttagataccaaagacttattgatatgtcaggctgtgggcggcatcctggggtctgttatggcaatgaattcctggtccttaggtgacaagaatgggatgagtgtgctatgcctggctctgagataaagaaaaaacatggaatgttaaggatcttaaagtctttacgggtttctttgcccactagttttcaatgttttttaattaatgatgcctttcaggctgtccatgggcccacgtttagaagtgttttgaatttcaaattattaatggtaattgttgttttctgttttcattaaccaaaggcatgtataacaacccattcagttcatttgtttattgatttgttcattaattcttcagtatttagcttgtatttacttttggcttggcaccatgccaagcacagggatgcagaggagtttgtgatggccaccagtcttatttaaaatgcctaaaatagggtcaggagcagtggctaacacctgtaatcccagcatttttggaggctgaggctgaaggatcacttgagctcaggagtttgagaccagccttggcaacatagtgacacctcatctctacaaaaaataaaaaaagttggcggggtgtggggtgggcgcctgtggtcccagctactccagagactgagttgggaaggtcacttgagcccaggacgtcaaggctgcagtgagcagtgatggtaccccacactacagcctgagggacagaatgagaccctgtctcaaaaaaataaataaaaataactaaagtgctccacaacagtggatggatttttgtttttcctaccatctcagattcctggatatctagaccaatccattgctaagccatcgtgctttgttttcttttttaaactttgaaatgttttaagtgtacagaaaagcagacaaaagtgacaaaacccatttcagatacaaatattttttatttgtttcagatttttaaaagaaataaaacattatagatacaacaaaagctcccagtgtacccctcctaaatcctgtctcttttcttctccagagataatctgtcctttaaatgtgatgtcttttcattcccatgcatgtttttatatttttgctctctgtgcataaatgcactgagtgctactaaaaatagtgctttgcctattttaaaattgtgtataaatgggaacttactgtacctgtcatacatcttgctatttttgctcaatgttgtgtttttggtattaaccttgttaatttaggaattgcatgttgatctaagaagttattttagttgctgtgcagtaagtatgctattgtatgaccatttcacaattaatgtacccattctcctgccttcatttttttgtgtattataaacaattttgccatgaaaactttgacttatctttctgtaaaaatgtgtgaagtttttctaggccaaatacctaggaatagaatagagtatgcatgtcttcggcttccctaggtgctgtggaattgctctccaacggccttatgccagtgcgagctccttcctacaggatataagttcccgttgctctttaccctttctaactcttgatattggaagtatttttagattttgcttattcaacaggtatgagaaactatcacagtttggatgtataaagatatgtcaagttgagtaaagatgttagagcaaagactggagatttttttttccttttcctcctgttctagctgtattgttctagctatattatagggcagatttgagtttctgcttgggtagaattatcctcatcaaagcctactttggccctaattagtttgctatacatccattgtacacagaacacattatgtacatttctaaggaattgaagagacaaagtccaaacttatagaacctatgttgggggtgcatagcaggagatactggggcccaatttacagtaggttcattgcactggccagtgaattcagggaccttgctctctatatcagcagagattgctgcctgtgtggttttttggttttttgttttgtttgctttttgtttgtttgtttgtttgagacagaatcttgctctgtctccaagctggagtgcagtggcacgatctaggctcactgcaacctccgtctcccgagttcaatcaattgtcctgcctcagcctcctgagtagctgggactataggcgtgtgccaccacgcccagctattttttgtatttttagtagagacggggtttcaccatgttggccaggatggtctcaatttcttgacctggtgatccgctagcctcggcctcctaaagtactgggattacaggcgtgagccactgcgcccggccgctttttgggttttaatgtccataaaatgagagattgcattagtcattccttcttcaagagcagattttcttttctgctttcaaaattccatgcttctaagtggcgttgacccttggtgctttaaaacgtcttaaaaatcactgatacttaattggtattgagaacagaggaacttaatgcaggagccaccactaagtgaagagcagttaaaaaatgctaagaagtcacctgcaaaattctaatctaattaaaattatgtaaaaaaagaccaccatcactcatgtataaagatgacagggaaaaattacaatgaatagactgtgggtgattattcccctcattgccctatttttctgttttccaaatcttttttaatggtcatggagtaatattcttggaataaaataataagcatatgcaaacaattataagctcatttggtaggaaaataagaatgtgatttatacaaaacatgtgctgggcaaaggggagaacacctgtatatgaaaaatgatttgtaatgattttgtaaataatcctataatccttccttgggttaagggttggtggatgataagtgtttttctttaggttttgctgctggaaagatccagggaagatggaagacaagtagactggcatcttacctaaaagcagtggcacagcaggtggtagaataatttgagcttcgctcattggattttaagaccaaaagaaaaggcagaactaaagagattttattcattaggtcacgtagatattcctattccaaaggcatatgacaaatccttcagagttgaagtaatcataatgcctacaatatattaagcattaaatatacatatatttttcaattctggaatagctgtgaatgtgggaataactgtactgactgacaggggagagatcagatagtttaagaaacttgccccatatgcacagctcatcagtggtgctgcctggactcagccaccatctgtttcactctgccggggcatacatgtatgtgtacccttgccctggcaaactcttccttttgtagagctgaaagcagccccctgcaactttcctatgtatttattctcatcctgccctcctgagcacccagccttagaagtctgctccctctttcgcacaacagcctttctgatcttcaaagagggctattgtgtccatttctccacttctcccctcttcggtctgtcatcttggaaaagctcagagaggtgtttttattcacagatgccttgagaaatttcatggtttttagactcatgctgagtttgtccagatgtgccaatatttgtcttatatgatacaaattaattgtccagaagaggaagaaacctttgtagacactcactaatgcaaaccagttcctttgagtattgatggaaggaaaaacactaaaaaatgaaacagatcattttcactgggagagtgtagttgttgaattcacattctacttttaggacaaatctgtagcatgacagttcagtcttaccacatgtattaaccatgggaaacctagggtgacatttgcaatagactcctgcttttctgtaaggactttatacagatggagaaagtatgatactcttacattttattaccaagttctgtggcccagggtttacagcataaggtggcaaataatttagctccactcagatttggaagagtaactattattattataagtaagatttaaacttagggacaggtacacactctttaaggagagttctaagactgagatgttgtatcattatcagtacctggcataaatatatgtatctgagttctctttgagaatcataagggaaaagatgtctaatatgatttaacctcaagacactaacaatgattacacctatcccctgctcccagcatcatagtcaccaactgtggcaacagctgctgctaatgttttttgaactcctgtggtatgcctggtgatgtactttatatcagctagttcattctcaaaacttgagaacacactacatataccctagtaagtactattgttagcctcgttttatagatgaaaaaactgagaggttaagtattctgcccaagatcatatataggttgggtatccctaatctgagaatccaaaacccaaaatgcaccaaaatctgaaacgttttgcatgccaacatgatgctcaaaggtgctccttggagcattcagattttggatttttggattaggaatgctcagctggtataaacgcatatattccagaatcttgaagacatctgaaacatgtctgatctcaagcattttgggtaagggatactcaacctgtatcttgtatatagtagagtgagagtctagcttatgctttgctcttatatcttgtttctttcttcagcaaaatagtctgtaaattgaacattaaacagtgcactggggacacagtaaggaatctttcattaccaatggagcatgaatgaaagtttccaaatatgaggtttccttagtgaaacactatttttaggaaaaactattaaaccaaggcttatgataaaggatcattccacatccaaatatacctctcctgtattagcataattctctactaaaatcacagctgaaattcattcactctaagagatggataaaaaccatacggtttcatgtaaagatcaccagcttcccagaactaggatgatgggaattttaactaatgctgctgtgactgtggcctagcctcttactctttctggatctcagtgggcccatctgtagaatgtgagcattggcctctgtgataatgaatgttccttctagctttgtatattgcatagtgcatgactgctagcttcaggaaaaataaaacgttttcaatggaaatatcagatcaccaacctgattccaatgaatttttttttattcactgaggctttatgtcatataaaaatatgtgacgtattactgctctgctgcccatctatttaaggcattcttcagtagacttgtcagggcttatctaaatcttagcaccacttacgtgtggctgattgcttggcaggaggaggttcctgcattttcttcctcctgtgtattagtgaattgaaatcaagggaaaaactgcttggctttctgcttccttccatggtaggtagacttttctacatattttccaacagttctttttgacagccaagtctggaaacagggcaggatggaggttttacaaataggtgacagttgtttgtctcatgaatttcttctatttcctttccctagtggagttaactgcctccttcctacaacaatccgaacgtacttccatcacagagtatctagcagtgtgagcaatagccatttctctcttttacctcttctggattctaaacccatcataggtagagatagaacatgtctgtgcttagatagtatctggcacatacagattgctcacttaatggtgaatgaatgaataaagaagaaaaagtgatgaaagaagaaaaactacagtcgtctcttggtatctgtggcacattcgttccaggaccctgatggatgccaaaatccttggatgctcaagtctctgatataaaatggcatagtgtttgcatctaacctacatacattctcctgtatactttaaattatctctaggttacttataatacctaatataatataaatgctatgtaaatagttgttacactgtattttaaaatttgtattatttattattattatttatttacttatttttccaaatatttttgatctgtggttgattgaatccatgggtgtggaacctggggatatggagggctgactatatatactaatgaacactactttggattatatgaaaatacccatttatgaaatggacagttcaaatgtttcctctttgactgttcttaacctgacctcccaacttgaagtaatctgttcctctcctctaaacagttatgtgtactatgtgtttggtaattaattatgtactgactcatgacatttgtttctgttcttataatactttttgattttcaaataccttatgactttgttttttattacaatttgttttcccatcaagattgtaaattcttggaggcaagggcaattattaaatactatatttgatacttaattcgctcctctcctttgggggctccagttacatgtatattaggccagttgaagttgttcctcaactcactgattctgtttacttttttaattccctttttccctctgtatcttattttggatagttttgatttttgtgtttttgagtttactaatatttatcctctgcaatgtctaatctgatgttaatcccatccagagtatttttcatcgcatacattgtagatttcacctctagaagtttgatgtagctctttttttttttttgagacgtagtcttgctctgttgtcaggctggagtgcagtggtatgatctcggctcactgcaacctccgcctccctggttcaagtgattctcctgcctcagcctcccaagtagctgggactataggcgcatgccaccacgccccactaatttttttttttttctgtatttttagtagagacggcgtttcaccatgtcggccaggatggtcttgatctcttgacctcgtgacccgcccacctcggcctcccaaagtgctgggattacaggtgtgagctaccacgccctgctgatgtagctctttttcatatcttcagtgtctccacttactttttgaacttagggaatatagttataataaccattttaatgttctgtctgctaattctaacatctgtgtcagttttgattgacttttttttttttcctcctcatcaggggttatatttccctgctttatgaatgcctggtaatttttgattagatgccagacattgtgaattttccttgttgggtactggctatttttgtattcctacaaatatttttgaactttgttctggaatgtgtttaagttgtttagaagcagtttgatccttttggaaagtcttgctttgaagatttggaagactgaaatagttgtacttagtctataactaattattctccatgacagtgaaaacactcttctatgtgctctcctcgtggcgtggggaatcatgaggttttccaatctggaaatatctttttggatatttctttccccagtgctgggtagttgccacacatgtatgcactgatcagcactctgctgaatacttgagggggattctctgtggctctttctgcagctctcttttctctgatacttggccttgcaaactctagttgccttggtctccctggactgttagctcaattcactcaactcaggcagttcactgagctctgcctgagttctccctttcctccagacaccttgagctggaaattctctcaggcagtaagctggaggactcgtaggattcgtttcatttgccttccttcttccagggatcactgccctttactgactgttataccagtcttgacaattatcctgttactccaacttggccagaaatggaagtgatacattttattctttctgtctgaaataatcctccatccccaatgtttaaaaactgccatccttgactccatgtgactgtgttaggagccctttctctggtctctcatcatacctgtgcttacagtaatttagtgcggcactcctctccctgcgttgttcttgcatttttttttaccctctcttttctcgttagattttgtttccttgaggacagggaatgtctttaatctcgggatttctaacacctaacatagactcaggtgtgtaacagttgctcaataagtacttgttgaatgaatgaattaataaataaataggattcaattttcaaagtatctgttgttgaacaactttcagaagtttttttttttttttacagaaatgagattagatatgcatcttcatatatgcaattgaaatctctcttaaatttctagataatcagttgttgttgatggcttggacatggtttttacctatttattttttgtagcctctccttagaaggtgttaataaaagccacctagttgatgcttgaaacaacatgtggaggtaaagggaccaagaatagaatagccatattctataaacaaacaaaatgaagactaacttttaggtatctgttttatgatggaccctcagatgtggtatatcccaagtctgccaggaggttgttcttatctgaagtgccttttccatgttggatgtacttagatgccttttatccaggtagactcagatggtctgcaaatagctctatggatttggcattggaaaacctcatggttccccaggcatggggagagcacataaaagtgttttctctgtcatggagaataaatagctgtgagtcgttgcattcttatcaactggagacaattgacagtggatatgtgccactagagttatggtcaagtgcaagttcatactatatttggatctttaagagtcggtagaatgaaccatatttggtaagcctctgaagactgtcttgctccatttcctcagcagctcttggttaccaaaggtgactctggagccccacctccaagtccccatcctgcacagttggcatgatggaaatggcttgaggttcttgttctttcagattcagtgttttcatctgtgcagtaggatataagtaggataagatgtaatttgtcaggttgctatgaggaataaatgaagtaataaatgttagttgcctatcacagtttcaggcacatgggaaccctctccccattcccccaaacttaattgaaaagatagccatcagcctctgaagttgaattgtgctgagtggttactaacattaaagacatatggagttattgtatctgtatctttcacttatcagcttttccttgaaggtttaatgtgtgttcctttgcttttaggccccatgtttattttcctgaaatggtgtcttcttgacttaaagtacaatctttgcttttttattcttttttcactgctcttgcctggtgatcctgttgtttaaagacatctccatccttccctatcctttccctttcaaatctatggcccagactgggggtggctttaactaacaacagcactttgcattagttaagtagagtggaatttctcattctacctctcagctattgatgaaacctttccctgatgcacaaattaagactgggtgtattttgcatattttcctagaatgacacagtgattctgtggctaaaccaagattagaccctaccactttaaaaaatctgactttttgcttaaagtgtaaactgtgttgcttctaaaactactagttgaatttaactttcaagtgtactttgtatttaaatctgatgatagtgttgtttttccttttgtcttgtttagatgagggtattttcttcacttccctgacccctagtgcctcagtgacctaggcagcaagttttttgatgctgtccagaatgctaattaagatatttattctctttggccctattgtttatgatacttgtaattatgtctattagatggtaatctctgttatctcccactatactaagtgtactactcggcacataaagaaatgtgtgagtatgtgaatgtatactcacatgtttgaataaatgtgaataaatcaatatatttatatagttactgatttaaatgtgttccgtcttgggatgtgagatgggataattgaataagaaattagcctgtgtgtgttaaggtagtcaaagtttttatggtacctttgtacaaactgccccttctgttgtgtgtgtgctgacccatgtcatgatgctcagcatgactggaggagtcctggtgtgtttctgtcctcacttgctccctgggttgggcgcccctctgcagggtacaaccaacacagttgtatgaagaccctctgactttcattttctggctggctgggggttttggtgttgagcgcttttaagtaagacagtcaccttatcctactcaatgttttcttgaagtgcaggccctgtgaagatgaagatcccctcttctattttggggacacttttgtgatgcttttatctgtctctccagagtctgatttaatgaaaatatgtacctccctcaccacattctgcaaagcttacttgagtttttaaaatttaatagtaaatatgttagtacatgttgattctagtgcccagcacatagtttctgctcaatacttagctataattattagtttatttaaattgccttaatcattcatgcaataagcaaatgtcccccctgtaggctgttctccagatctgggatacagacatgggtaaagcttggagcttgtgtataagtagcggggtcagtcgcctgccagttcactggagagatgccatgcttggagggtggactgactgtaaggccctcccagttgtcagactctaggcttctagtgtgccctccctcactgtacagctggtcaatgcatggcactagaaagtgcaaaggcttcagtgttggatgagtgtggatttgaatcccagctgtgttgtggactagctctgagcttcagtctcttcctcttaaaatgggaataatagggtagttgcaaagtgtcattgttaattaggccctgggctaagttctttactcctgtgattttatgaaatcctcaaacagccctgtgaggtgtgtcttgttaatatctgtattttatagatgaggagcctgaggcacagaagggtgaagaaactggcctaagtggtagagcttttcactgaacccaggcctattagagagcagaggccacattcttcactgttatgcagtgtcatgctatgttatctgtccagacatgttacgattcctggcacacaggatcagagcaaatagtagctattattcttattactattattgttctaaaattcaggcctttcttcaccacactgacactgagtaatatatattgtagctgttcaataaaactttattggatttaattggttatgaattttatgtgtgggaaggtggttaactttcctatctgtaaggagaaatgctcaatagaatatcttaaaatgggggaagttatgaaaatataaaataacaaccagagaggcaaaccagtttatgagattctgtattagaaagctggaaagaagtttttaataagaagaatggaggctgggcgcagtggctcacacctgtaatcccagcactttgggaggccgaggtgggcagatcacgaggtcaagagttcgagaccagcctggccaacacggtaaaaccccatctctactaaaaatacacacacacacacacacacacacacacacacacacacacacatacacacacacaaaatagccaggtgtggtggcacgagcctgtaatcccagctactcaagagggtgaggtaggagaatcgcttggacctgggaggtggaggttgcagtgagcagagatcgcaccactgcactccagcctgggcaacagagcaagagtctgtctcggggaaaaaaaaaaaaaaaaaagaagaagaagaatggaagggtacaatctggtggtagacaccatttgaaaatattctgtctagcaaatagtgtttttgagtaaaagaaatagacatgacaaatcagttatgtggccatcccttataacaatgatgaacagataggagggtgtgcaatctttaaagtttagaaacaaatttgtccttctgacatccttcccttctcttgacacacggttggtaatggccaagattctgttttgcctgatggagttttgagtgagttaaattaggttgtcttgaaaatagctgggccagaaaataaaaaggttttctctctttggaaaggggctttactccagggaagaacacagctgtccaggaggaatccgggactgttgagtccagaaacttcgatccttctccaccctttccccagtgtttcaccagcagaaaaagaatgttattaaagtctgtgatgaaacaaagctgcacgctgagacgtggctgccagaacttttatttttatggttctcttgagtttggggagaaataattaaatgttgcaaatgtaaaaattggcagtaacattttccattttgccaatagtcattcctttggttttcccttggattttatttatttctttctccttttaggcattgctctgtcatagcctgcttgagtgttgtgtctctaggaaggccagaacaccaggtttggatgttacatagccaagaacattgtgtagcagtgcctggttttgccacaagacaggtctgtaggaaataccactgccactgcagccgagcacgttgaactgactgtgctcaggaatacttcaccagtaggcttactggaaggtatgtctttctgcatctgtgatttgcagaggggcatatgattgccttgctgttggaaacataggaaatatggtttttggggattctactttgaaataatggtactcgtcaatgcagtgggaaactacaatatcaggatgttaagaaagggttcaaaaggttttaggaagtcttgaaagataaatgcccattccaattgagccagtaggtcagtcttcttagggtttctgtgataatataggactttagagtggagacgcctttcctgacaagtctagggttgattttatgtatttgctaagatttattaaaataaaaaatggcatattctataaggaaaaataatattaatggtattttaattaagcttaagcaataaataatggttatcacataatttttatttattattctttaccttatttcagggtctgtcttactgtgaagtttcaataaaatgcttagaactacattttcctggccaggtgcagtggctcatgcctgtaatcccagcactttgggagaccgaggcaggtggatcacttgagctcaggagttcgagaccagcctagccaacatggtgaaaccctgtctctactaaaaatacacaaaattagccaggtatggtggcacatgcttgtaatcccagcaacttgggaggctgagacaggagaatcgcttgaacccaggaggcagaggttgcagtgagccaagatcataccactgtattccaccctgggagacagagtgagactgtctcaaaaaaaaaaaaaaaaaaaaaaagaaatacattttgttttattgcaggcaggatacatttcaagaggcttacttcaccttctctgtctgatctccgccaaatatcttggctttgtatttcccataacccatctgttcttcatgtagctgtgaaagaagtatatctttgaaagcagaattttgagtaaagaaacccgagagttagggagagatgaccaggttccatggctccttgttaatttcaccttcaagccacatactgcctcttcttgggcccttgatctactgctgagcatatctttttctttcttggtgtgaattctgcctctcagtataggtggtatttgttaatttaactctgacataaacatgggaacactgcgcctcagtgtcattgtctgtaaaatggggttataaggtattttctgacctacttaaggttaccgtgaggattaagtgataatgtacaaagaagacttttaaaaattaatattggagtatagtataagcatagtgacatacaatgaattataatcaataataaattgaatttcactttgtgacctcataaaatttgattcctttcagctctatcaaggacagcatcttgcctaatcactttttgttttagaaaagttagatgcttgtccaatgtcacaaagcaagttagggtagaggtagggcaaaagccctgatctcctgactcccacaccagcaggatgcttagttgtgatttctgccttgctttaccacttgggtcatctttcagtgaaggaggtaactatctcttctttcttgagttaaaataataccttagtagaagcaaagaacactatcactttagttcttttcagccttcatttgctgttgccttctgtgtctaggcgtgctgagctggcaggaaggtgacaagtatgatagattctggcctctaaggggctgtcaagtctagtgaaaggaggtaaatgagtaaacagatagacacttcggagcctgagtttctggtgctggcccttacacacagggtctatctgggcaagtcatgcctgtctttgggctcaggtttcccagctgcacattgaggtcctggactagatgtacagaatgatcgtgatcactgaggttccttctaatttgtcaccatctatgggtctgtgataatgcaaagctgtgtgcttgccagctgaaactgaaatgaaggaaagtgattaattcatttcacaaactgaaatgaaggaaagctattaatctgatggcgtatttttctttatttgtgataagtttcacagactacattttccagcattcaacactgccattgtattgtattgtattgtattgtattgtattgtattgtattgtattgtattgtattgtattgtattgtattgtattgtattgtattgtattgtatcatagatggcgatacttgttcagttaaccaaatggtcaactttgcaaaaatagcagaagtggacatctcatgatgatttaatacaggacacaaaaatcaatgctagcattaactactattctcggcctttctgcagtgtttttctgataggaacctttgtattaaaccaccttctttttttcctaaaaaggaccatagcataatagcagctagcatttatttggtgttttcctgtgtgataggtaagtgttgttttaagtgcttcccatataaaaattcatgtaatctttgcagcattttgaagtaggcattattatcatccctattttagagataagacaaccgaggtacaagaaattaagtaaaacttattcaagattacacagctattaagagatggaggcaggattcaaactcaggcggtcagcctcaggcagcctcatgtttcatggctggaccattgcctaaatgaaagctgctcactctcagcctattgagaacctggagaaactggccttgttatgaggccacaggctaagaaagcagttgtatcagcttacttgtggctctaaacttggccagatcctcaagtctaaggattcttactatgcacaggtgttctcagtctggattcatgtctcaggtgactcatgaacccttggaaattgtgtgccaaatgcatttatgagtccatgtgtgttgtgttggtatgacggggggtaggcggtttggtggttttctgcacagtatcagcagagcctctactctgtcactggcaggatcctagctgtgcaggcgtttgtcagcctaaatctaaatcaagattctgggctgggaattaggatatagctccccattgaacaagtgagtggctataggatcttggaagaaccaggctttccaaatgtcctcccaccccttggaactctgctgctgtggagcagttgtacgatgtccttttctctctttgaagctttccaaatctttcaatcttttttttttttgcctccaaattttggaacctcaaaatttcaaggtttttttttttaatttttttattttttttccttttgttttaccttctcctttctggctttgttcagaaatcaggtatcaataagctttttattactcatccaatctgtgagttcagtttcccatttaacttttatgaatgttttctttgttaagatgagtcctttcaaacccctgtaaagaatgtttcactatatacaaacataaaaacgaagtgttaaaactagaaaatccaagtggaaacacaaacatacatatacatttttccccaggcaatttagcttcatagaaattgagtgcatctgcaagggaatttttttttaaatgttattggtagttttgttatttgtattacctgtttggtcctagtctttatagttgattactctaggtaggtctttttaggactgaaaataggtcacacatatcacagtggtcccagtgttagagagatgataaaattctattacaaagtagttttgtcatgcttttggtctaaatgagtaatacaactagcatgtccagtgtcatttttgctgtactctggaaaacttttaccatctatctcatccttatatactgcaacaaacttctgatattatttcaattgcagttcaggcattgccctcgacacaggcttaagttcaagtctcagctctgttacttacaaaccatatgactttgagcaagtttatttaattttgtggagtccttttttttcccatacaaggggaaaacaataattacatgttgctcaaagggttatgaggagtgaggtcaggcatgtttatatgtttcactctggcgttttgcagagtaagcacttgataaatgatgctcgtgttattgattgtcatcatcatcattaatatgtgtaataggctaggtacagtgcttggcacatagcgggcactaaacaaatattttattggatttgattgtacatagcgcttgtgactgaatcagaggttgccaggggtagctttttgctcagtagattaacaaggaggaaattgttgaacagaacaactgatggctctacctttaagtcaatgaatttcatagtgaagtggtcttgaatgcaaatgatgaaatgtggcaagtctggtggagaaaaaaacccaacaatcttgaagctgttttaaagagtagcagttgcctagtcaccccaattgctgaaattttccttctcttccttgaataaggagtagagaggggcagagaggttactggtcatgttcattaattttctttcaagaactgccacatgtcaccagtggtgcccccccagcaccagtgctgtttggcagtcttctctttgccccagagaagccaaaatgttaaattgatggagcttactagatctgacagagaaattcttcacgtctggcctggatgtctaagtaaatttggtgtacttcttgtggtctggagcaaatgctggaagctattagaattctgaacaaaaccctccattcaaagactgctcgtttcctgctggggtaatccaagtatcaaacattaagaaatatgggcaaggcaaatgtggctgctcattgcaaaacccaccaaggtgtctacgacatctccccaaatgacttggaatgttacatccacttgatcatcttgaataagtggtttcttttgaaaacaagagctctacttttcctacaccaagtatagatgggaattggctgaatttcctcttgtcagtcaaatttaggagaagaaagctttcctccttcccttgaagttctagggacctagcctttttttttggttttattttgtttcattctcctttccttatatatttccttctgaaataaaaaaaagtatctttcattagatatagttatggatctattgttttagactaggcctgctcagtggctggaaacgattttattaagaaggctttatagagaagctttggtttatctcatgaaatatctgagtttgtcatagattgtttcctttctgtacagaaagttattttctgtgaaattccaggtgttcttttacatagacttgaaaggaatagatttgatagtccaggttttttttttccctaagaagaatatgttcttgtgatagattaattgaggatgaaatcagataacatagatgaaatcactggataggcatagtgaaaaccattattttaattaatctagctacagtgtttgtacagccagctatgcagctgaaggctgccatgtagtagctgctacactgtttggctcctgtacttatactgtatggggacctctttcttagacagtctcactcctgctggactgtaaactcctggagaacagggacaaagccttgttcattagagtattcctagtgcattccactataatagacacataattaatacttttaaaaaatgaacaaatgaataagacatttgtacagaacttgagtgttagaccaggtggtttcacaaaacaaagcgctcacggaggtttattggccttcctcctatgtctttgaccttttccttagcttgtgtctatgctgtgtttcctgtctacgagatggtggagatggcgagcccagttttctttcatcttgaaaggattcagctccattacttaatagtcccagtcatgttcctttccccctagaatctgtgtatgagatgtgaaatccatgaaaagataatgttgaatgggaaaaattaacctattttgatgacttttaaggagttctaactgtgcatgatagcaggcgactcccttgtcagtaggcagcaggcctgtgttatgtcaggggtaacgaggtggttcacttgtggagagttttctgtcttttcttccaagttatgctgacctcgccgacgaaaatattccccatctaataaaagtcagagcaaatttatgggcctgcccctgaccacttgtcctttatcctttaaaagaaaaaataaatctaggataagatccataggttactgttggaccatggaaatgatgggcaggggccaaatatcccaccttccttgatctgcttctcttttcccgattccggctgtctgggggatgctgaagcttgtggcatgagggttactgccgagcatggccatgtcgttagttccctttggaaacaagctgttgctctccctgcctggagggccacacgccttggcaccacactgaagagatcccaggcgtggctggagtgaagctgctaatgaaaaagcagccatggcaggtcaggacgaatcaagcaaaaaggaggacattctataattaaagattcagagaaatactagcgcagtttttgttgttgttgttgttgttttgtttttttgtttttgccaacgctatgacaattgctctttctacctgttcccgtgggttttctgtcattttatcactcattaaacaagtgtttattaaatctctactttctgtgtgctgcttacctgtgtgctgttgaccatagttcagggattacttaaagcatcaatgagtgtgcgatgactcaggaatgagtcgggtcctcaaggatcttgtcacctagtaagagacagagaaatatgaggcagagggaggctgggccataggatatggcaggatgcagagcaaagagctccagagtctgatagacctgggatcaaattcaggctctaccacttatgagcacatttggctttgggcaatttacttaatcttgaacttcagtttctaaatctttgattgtgcataatacacagcgtcctggaagggttgttttaggatttgaaataagctgtgaaaagggcctggcctagagttagcacttgacaaatggctgctcttattattttattatctctggcgaggtgctgataaccatgtgagttcaggggaggcagtctccaccccgtggacagaagtgagaggatcagcaaggggatcaggagtttcatggggcacatgcctctgcactgagcttgggagaatgagtaggatctgggaacgtcgtgaaggagaatagagaagaaactttattcaagacataggtttttacacattttgttttgtttttagcaaataggcacttattttgcatcatttttatttgcagtatgcaatcaaattgtgagattacttaagccttagcatgaatcccagtgccaacagttgtgtatttctttcttctgctttcttttgttgtcccccacaaccttctctgaacagcatctattaagtgattgcagagtctcatgacttggttgtgttggaatctctgcattagtggggacacccttccaattccttgttaggatcaaatgtgttttagagaaggtatctggttcccaagttctctgttgttttttggaaccatgaaagcctagagatgttatggcaggatgtccctaatatgcatggcaagccctcgacaatgattatggcagttgttactattactgattatttgtaacttctaataatccagaatttaaattggtcaaagacacgctgctcctcagggagtctgaatatactggtatcagcccagtgtccttccacactggcctgcagctcattgtgactgggccaactttggcctttgtgcctggcttctatgccaacctgccaagtccttgagatgctgtgcaccttactattttttgtcaggcctgctaagaagggggcttgtgtcctgcagatcaaggaccaataggaagccctcaccacaaacctgattcacagtactctctcctctttgcactttgcactgaagaatcatcctctcctccatacacattttttccccagtacagaacttagctttgtggtgctgggttattaaggaacccaacttgtatccactgtagttgtaatcttgctggtctttgtctgagttgcaaaacaacactcatggaagtcctcattcagttattctagagcacttgttgagctcctggtagaggcagagtgctgtccaccagatttgtgcctgatggcacagagaatgatcaaaaggaatcttgcaactggacatagtttctttagacagagacagaggtaagtaagtaacctcacataagtatcctaactcttattttccaaatgttaatgcttgactggcatgttataaagctaatttgtttatagttgtgccacataattatacactctgtacataatatgcttttgaaattattatttattgcacaaatattacaacagaaactgaactcaaaacacaaggaaaaatgtgtgtgggctcaccatttgtacgagtaaaacttttaatatatttgtgtgttcactcatagtccttatccatgaattcataacttttgcacacagtggaaatcatactgaagataccattgggtgttctgttctccccattctcctctccccatacaccataatattattcatgtatgctctcaagtttaatcatgtctgcatgcggacatttagctatccttagagagcccataatttgaactctgagcatctagaggaagctgctgcccccagcccacttaggtactttcttttccccttgtggtgagaataggaattaggtagcaagagttcccaggcttcattgtccaaggctatgttagtattttcatcataaatcttgaggcatcgcctattaaagcctttttgcctttctcattaaaagaagagaatttagaaggaaatatttgaaagactctaagatgcccaggagaaaggttccaacattattactctgagtagaccaagttaggtgtgggtatatattaatagtaactaaacacctagcagtttggtgtattctggaatgctcttgacttgggctgaatgtgtctgatgctctaggtgttcttgctgtctctgtctgtcatctgcctgtcattctcctgtgagggtaagtagtatcccttcccagactgaggatggaaatgttgaggggtgtaaaatgataactcaaacctttccaagagtccccaaagtgtgtacagtgcatatgaaattctccaaaaggagaagagggatctggaagtgccactgggagtgagaggctggggaaccagtggagtagaggatagtagtggcttgaagtcacagagcaagaattcaaaactttgctctggcactagcttggtggccttgggcaaattacttaatgtttctgaatctttccatgaggaagataattacattgcccacctcacttggttgtggtcggtattaaactggataatgcaaataatgcacttagcacaacacctggcataaataataagcactcaataaatgtgaaatgttatggttgttatttcctgcttcacattataattttattgctttccagactgatgtctccgaacttaggtagtagtggagtctgtgagctattttcagtatttcaaaatctatgaaaaggagacagttctggtcaccataataagtacatgacagatggagtctttgaaacatggtacccacaggggaagaatccagaaggggtcctttgtgttgaaaagttgaggcctcgagctgaggaagttagcaagtgcttcagtgaaagcttgtgggtttccagttacaatgggagtaaatagagggatgttgtgagcaaagaacttgattggttgctatgagagatcgttcccctgtggagcatcagaagttgatgcactctggagaccccagttgctctgtcatgtttaccagtttgtagaatgtgttatcactgccaagcaccttggaagcagtgagaaaactgccagacaaatggaaaccggtttctctacccaacttggtagaacatttgctccaggcaaccatacaggctccaggagacatttgccttgacagtgcctattttgtaaagctgtaatttaaactgacaaaacttgattttgacattgcaacaaggtctctgtagacttaacactatgttcattttcccatgcttatccctactggagactgatgggtttacaccaacatggaagctggttggaatggaaaccatccagaaaatgattagggagcttgaagctctctgaaactgggcataatgtgtattaagtcattatagttttaatgaaacttgtcttagctggggtctcttaaccacttgttttctagttgtaaatattgagtccctaatttacactaatgagatgctgttgagatttaacgccaatcttatactgcatttgtcaaagtgtaagagctaacctgaaatgtagctttgcaaaatattctattaaataaacttggtggagaagtagcaacaaacaaactgcatgctttcagcagaaactgtcaacatacacatctctgaagaaattcatattttatgccagggtggtctacagtagttcccattagtaaacggttaaatatcacccttccctggtaaatctgaatacttttgtgtctgttgtgaaatgctgtacacatcctcttttgatgatctgcctgggaattctccactgtgagaattgtctcttaaaaatgggaagcagcaaggcatagtagaaagaatataggcactggtgacacatatatttaggcctgagcccagctcccagttggtggccaggtaagttctttaacctccttttgcttattttttttttctccctgcaacatggggttggtagtacttatagggcagtgctatccaaacacttagtagaggtgataatgtaagtagtgaacgtagctcctgacatatagttggtgttccctaaaggatagattgaaagatatacacaccaccaagttgaattcctctcagatttgtccaaggccacccagcctttcttggccttttcttccatcattggttagtgtgtgttcttgaaggcagtctgattttatccttggcttaaaaagtggggaaatatttaggaagcctagcctaatgcaagagaactcatctatcttactgtaggatcaaatacaaatggtttttggattgtccattatttatctctcacttctcttcattagtggtgctaatggaaacacaattatcttcatagactttgttagtcacaatctcttggtttcttcaaatcccacaatagcaagaatatgttgtggtttttataatctcttttggttcctcaaacccaaagaaggacagtgagagggtgggagatgatttgagagggtatttacattcccaggattttcagatatatttatgattttatttttttggagacagtgttccaatagagaggtattctgtcttctcttttcttttttctcttctctctcctccccccaaatcgaggttgtaagtgatgtgagagacctgctgtgaactgctgtcaccagatcctgctatgatttctctttgttcttagttctggagtcatcaaggctacatggagacacgtaccttccactgatatgtttgctccttgattcagggctgagtgcctgtttgagtgattctggctacagctaaatgatatttctgtttccaatagtattgtaaactatagagtaagaattttcttgttgttgttgggagagtttgtttttcttcttagtgtgtattatctcccaccccactcctccaacccgttctttaaaaaacaaaacaaaaccaacaaacaaaaacttgcattgaagcaacacccagaaggagtgagcaggcctaggctggagtcttatcctgacatggtagaatcctgttactgtctcttcgtagattcatttaaattgttttgactgattcatgcaatctctcagtccattgatcaagtcaaaagaaaaagtatcactaaaaactcacaggactggtgcaggtagaatattctttatctatggaaaattcattatcctatctagaaggatgtcttgaaatagcagaatatttttattatgttttttttccaagtaatacatggttcaagaaaaaagaaattttaaaaagccacactaatagcaaaactaaaataagcatgaatcttaattttaacaaagattacagtagtccatgggaaggattgtctgcccattgcagtgggtttgattggtttttttacttggaagtgctcatattctggaatgtgtttatagatcttgaccttagatacttctcctgactcagaaattgtaaaatgttttgctagagtagccagtggtgagagaccgctactgctgtatgttgctcagggctaacctgttaagaactggtctcgtcgctcagagagaaccatgatgctgatgccagtttcttgtttatgtaaaaacatttaaaaatgggcaagatactctctaagtacaagatagttattattgagatatgttcatgaataaattaatgagagaggaacttgagataaaggaaatggaggagagaaattgcatttttcctgcataattactctcttgttttagaacacaagtagtcctttggcatattttcaaagtgtggtatgtttcacttttgtttaaacttgtcaaattctcaatgtaaaagccatttaagacttttttttccttcttttttgaaggttgcttcttttggcctcttaaagataattaagagctgtaatttgtgaggattttgatggcattttttggcagtggtagtgcaggacaggatacatgaatcatagcatctgcttattagcaaggtctcatagatcacttgtccaactttccaccgggtgctgagatggttggtctctgttatctgttcttcccacttctgctggatacattctgggaaaagaatttcattgatgagtgagctgtacttccacttctgaagtacaaaagttattaagctagggagcattttctccatttgacacctacaggccactcagtaaaaaagcaaatgaatgatgaatgagtaaggtccctgggctgcttcctacttcttcttagagtggttaaggccctcttgacatttttggaggatgataaatgtgtgcccttgaagtttccttgtccaggtcaaacagccccaatttctccatgatctttggacattgcttccacattttctctccttcttgctctccacagggcaagtttcatttcatcaatttttttttgtaaaatactgtaaagatatctgaatgaagtagaccaggtataatctgataagcatagagtatggtggagcatttcttttaaggttctgggtattgttattatcctactaatggaaccagcatttgctggaccttttggggccaccatgccttagacaggtagataatggaatggcatagagaacagcctgaagccggctgtcttggtttgaattcagacttaccatttatgaaatgtttgaccctaggcaagttgtttaacctctctgtaaacttgtcttcatttgtaaagtcaggggtaatcatagtacttatttatacagttattataaggagtaaataaattagtttgtgctgagtgcctacaacaatgcctggagtgaaataagcactctgtgttagcttttattgaatttacaatgaaaaacgtccaggtcttactatctgaagtgcagttagttttttcagcaaggctttagaattagacagggctatgtttaaatcttagctctgctgtgtgttttgggggaaattactttgcctttctaagcttctgtttcctcgtctgtgaaaagggcattaaagaataaaatcagttgaatttctgagccctaattaagaaccttgagggcagagccatggtttacacttgctttttttcttctttcttaactttacctggtatgccatgtttataatcactgctaaattaaaatagtaaatatttaaactgagttttcccttcagtctaccttgtagtagaaaaattaaatacttctatgttacttaaaactgcacactcacaagtttatggtggtgtattgattggttgttctgaagaatgtattctgcttgccaccatgaactgggcttcagaataaataggcttccttgatcacttctctcctcattaactactgtctggaatttagagggaatacaaagtctggtagctacattgcctactaatcttgcaaatggcctgtgaggtgggtaagcaatcaggtgagtgacaaaggttatagtcaattttcctggcactctgggatttatttttgtgtccttgaagttttaagcaagtgagttttgaggttgttgagaaagtgggagactatattttaaaatggtttatagttattaatgttttcaaatcttggtgggattttaaaggtgggttaagctgcgaaagtgaatgtaagttaaagccagttaaatagaggagtccctcgttcattctgtctttggtatgcttaggatttcataaattttatgggtttcaaaatctttgccttgttttgaatgtttctaataagatggagtgaagtggcttacacctcatgagacatggaacagttatccaggaatgctgcttggcacacatataaagaaagcactggtctattgattcataaaaaatgtgtgactgattttcctgggacatgtgcattattttcacagaagaatttcattttttacttcctcccaccctgtgcatcacttgcacacgtttgcaattcatcaactctgatttccaaaacttctgccccctcttcccccaaccacctccatccaactacctaaagtgaaatatattagatggagaggagggaaatttccttaaatgcctaatttttatgtctgtaaggggcatggtgaatttgagaaatggtctgaatgttagcccagatgactcaatgcaattatgaaacaaattggaagctgtttccatgaaagagtatgtatgcatgtgtttccacgaaaggggtgtgtgtgtgtgtgtgtgtgtgtgtgtgtgtgtgtgcgcgtgtgtgtgtgagaacatgtgtttaggtcagttctttcattcgttctctttcttcctcttctttttgtcgtttcaaggctatgttttaggttggctatacagcaatgaggttgcactacacagcctcatcccctaaagccaaaatacagcaagtagaagactgcttagctcatccagtgagaatctcatgtattatattcttacttgccattgagttgccagaaaaaaaataaatagctttgtcttagaaagcaataacttttctgcaatgaaataacattaaacaactctacctggtatgccatgtgcattgtttttcctttcttggaaaggaaaaactttcttagaaaacgagggcacacaatgattagcgctaactttctctttcatgtgtccaacttaagattttctagtgaggcagagttatttccccttacatgcttggtttaatggaaagggcctggctttcagttttgttcatattcagctaccaagacccaatcagttaataactttgcccagagttgaaagaaaaattcctctgggtacagagttaaattcctctgcgtgtggaaggccatagtggttaaaaagttaggcttcggagccagatcaacatagattcagatgtgcctctgctgctcaatgtgtgatgagggcaaattgctgaactcaagtctcaagtttcctcatctgtctgatggggatcataacgcacatcacctgacgttgtaataattgcctgacaatgtgtataaggcactcgtgtaagatctggcacttggcaagagtaaaatgcattttagcctatactttttactcttcatttgtaaaattgtggtaaagggattggccctggagggagtagggtgaggtggcattttcaggaaggtagcacaaggttacagggaggacaatagaaatgtacaggatggctgaagactcagtaagtaaatagcattgcttcttacagcaggccggaggagatctctatatttttctttattagagaaaatttaagggatattgatttttaaagggaagatttatattttaattttaaagaggaaaatttatcagctcctatatatttattagacattttgggggggaaacagtgaatgaatgagactggtcccatttgatgtatgctgtcaaagtttataaactatctgatgaattagtaagaacatatcaaacaagacaaagaggctcattgttaatgtgcgcaggtgaggctttgcaggctgcttgtgggtgagggtaaaagttttcttaacctcaagcctggattctgaccatagaaacattcctcctgagtgagtagtgcttctagagtgctttccttcaaggacctctccggcatctggctcaatcacatgccatctttttctcctttacatctgcttccttgccccactttggcacccagctaagtgtgggcagatggtgtggccttggggactccagaagggccttggtgtccttcagtagcatggagtgtatagcagggtctgcccgtgaaggaccagggaggtgaagggccttacaggactcatgtggaatgcttgtgaatgcattatttccaaatatccctgagtatttgcaagcgtttttatatacctttacttccattttgctttgacaacaccattaccattccttgacgatgaggaactgatcggaaataaacctaattgttatttgcttaacagtttcaagacctgcaacttgcagcagtctcctgacggtctctgtacattttctctgtccccttctaatctattcaccacattgtagctggagtgatttttttttttttaaacagaaatctgatcatgagctttcttggtttaaaactccttcacggctgccatttgcttacaggtttagggctgaaatccttgccatggcttggcttacaggactctgtgggtctagcctctgctgactttgctcctcagcaccaacctattcatctttcatccttccctctttccagaaaacctaaaggtggagccctgtctgctccatctgctgccctggttactctcatccagggcattcattctctttttataagtactgtgaggccttttcacaatttgttactactgcatagttatgtacttatttcttgccagtctccctcacaaggctgcaaacttcaggagagtgcagaccgcagcctgttcagtcctcatggtatatgaagcctgttgcattacaggtcctgagcctccatttgttgaataatttcattaattaattaaccaattaattaatttcctctaaagggtttgaaaccccaactattaaggcttatgttgaaaggacaatttaaaggaaaataaactgttagaagagggagagatagaagccccagaaacttggaatgagtcagatcttacagctgagcaggaacgcaagctttgaggaaagctttatttatttaaataggagtctcataaggaaggcagaaaaaggaaacccaagcagatgacttggttcctattatctgctgagaggaagctcatctggagtgatgactttttcctggcactaaatttgacctgaaaattataaaatgaatccatacagaataaaaaataccctcctgctcccattatggatgatgtcttctattgtagtttgccgaagggacagagtttgtgagagggagtgagttgagatgaggtggagatgaaagcctgtatataatttagagagaacttggggcaaactagaaagatagcctgtggtctgagatgagggccgatgccacagacatggggacccctttcctttctggcagcattttcctgtgtgtattctggggggccttcaaggtattctgtgacaaaagggttctctagtcagataggtttgcaaaacactgcgtattatatcctggcccacccttgaagttgtataatgcataccaataaataaagaccctgagaagtgagagtcttatagtgaagagatgtttagctgtttaatccaccatttttcaagcttatttgacctcagaaaacataatcatagaacttccctcaaaacagacctgagtaatgctaatttaggagttggagagaacaagaagtaccagcatgagatcaaggtagagaaactcaattatctttgtagaaacatttctactttgaaatagaaatagaatgatctaagctgaaatagatttttttgtgtgtgttttattatagtagtggttggagtaggggtccccaaaaagtaaggattaagggagtgaggatctttcctttatgaaaatggtatggacccgtgtcatttaatggagggttttggtggttaggaggacaggctactgggtgtgagttcagggtctaccatgttttagctggatgacataagaaattgcctaccatcacagtgcctccttcctcacctgtgaaatgtgggtaataatagtaatgactacaagagctcttctaagaattaaatgtgatgatgcatgtataatgctgagaacagtgcctggttcaaagtaagagcttaataaatgttagctattagtattgctgattaaagaatgccaaggaattaataagcatggaaagattggagccctttactcagagcaaaatctagaaatgtctaatagccaaaatattcttctcatggggccttttccagcttgaggcaaatgataatatgtttagaagctgatggggtaatagtttcccagctggagaaaaacctgagtcttcatacaaggagagagaaccacaatgtgtgttcctgcagtactgctgtggaagtcatgctgtatgcaagtacgtccaaatcaataatcataagtagccccgatggctgaacccaaagtctttctttataatcttttatattatttctttaaaagactctgcctgtaaaagaatctgaatctagtaaacttactcgtgatttaatttgagctctgtttgaggtgttggctctgtttgttgattatgccaggttcttttcggtttctaagcagttgaatcaagtgatagaatgtctggttttctagttgcttcatacatgaagttgcatatccatccatctatccatctatccttccatccatccatccatccacgcagtaaatatttatcagtcaagtactactaaccacttccaatttatgaagcatcctcacaaagcccccaaatgtggtttaaatatagcactaggaattctttaggcctctgaaagttacttatgaaaatgacggagactgttctgtcttattttcttatcctcctaatttacaagttctgttctgtgtacactgtgactctgtaagagtagtgttggagactagattaaatgtagatctaaaataccctgtccataggcagagataggtaaagaatggctaattactaaataattaataatagctggtgatgctgctggcccttatttgacctttacataagcacagctgcctctgggctcatcccaggggctatctttatcaacactagagtgtgataataaatgagtttctctaggaatttttctttttgttcaggcactgtctctgaagagtgttccatgggaaaacaatcctcatgatatacatttttttaatagataaaactttggcagatccattttcaaccctggcattcagacctcctaaaattgctatcagctaatagagatttaggatatagaaagctgggaaggcagtcaaattggttcccggccactaaggccctgcatgcataagtatcacatgagggctatggacaccaagaccaatcaggccaggcttttcaggaagctctgctcagaatcaggtggagaacattcttaagcagtagtcaattattattcttgaatattaatcacaattagtgcaaaagactacctcttgccactaccagaattattttgtatatagagatcttatatgagcatgggaaaatttattttttaaatgctactctctgggaaacaaagtcattcactcaccaggtgtttattgagttaattttacgccagacactttgctaggcctagtgatacaaggtgaatgaggcatggcattgcccctaaggaaatataaaatagtatagagtttcaacttaagtgtcagatccaatctattaattggtagtggctgcctggaggattgtgttggggagaattctgaggctttgtctggacacagtgattgattagaacaatcttccttgaggatagaaaggggataatggtagatgtaccacccattttctgtacctagtcttctgagagaccggcaggcagttgcagctccatatgttaggtactataggaggggatcatataggatactctgggaacacctaattctgcacatggagcagaaaatagcatcacaggcggttgaaactttgaactgagacctgaaaattagtaggagatcccccccggtgaataaacaagagaagtgcattttaggcaaagaagcaaagttggacctggaagcaagcaatggtaggatgtgttgggaaaggcaaattgttctttgtactgggaaactttgccaagaccagatctcactgaaggatttggatgttaggcccaggagccttggaggactgtgagacaacactaaaaaaataccgatccttgaaaaatattaatctgaaaagaaggcactgatggcaggcaccctttagagctctggcctctggtctgttctgttcaacctctatactgatggcttggttagacaaagatgacgtgcatgttgatcagattaatagaagacacaatgtttggaagttttgtgagcctgtgggtgacttaatctgaaaccagatgtctcaaacagcttgaacaattccaaaccagaggatatttgctagggaaaatataaattctgtactctggctgaaacaaccaattgtacaagagcaggatggaagaatatttagcctggcaataatatgtgtgacaagagttagattttggttacaaatgtcaccagtctacaatgtgacatgtccacactgagaaaatagtaatgatgggcatgaagagttctaaaaaagttctaatcatcctgtctccttctgtcatgggcctactacaaaaggagtgttcattttggtaaagatgttaagataaaaattagctggcatgagtccagaggaaaacatctaggctgaggagatattttggttgatgattttagggttactaaacccagaaagagaaaattaaggactgtcttcaaatattttgaagataatcagtagcctagcacttaggcttatgttgtatggagtgatgaaaaatgggtagacatttctggaaagcaaatttcagctcaggttctcaatgaagcctccaatgatgggagcttctttgaagtggaaagggcaaataataagtttcctgtccgagaagtgaggatgcagagaatgggttaacacttgttggaaagattgtagaagggatttatgtattagatattgtttgggctcaaaggtccttccaactctgagatttttttcattctagaggaaaaaaaatatccctacactgtactgtctttgaagccagaaaaagaacatctataaatttgagcccaacctttaagttgtgtctcttgttggggcaggtttcttgacttgctgtgatgacagtggagcctttctatccctcatctggactttacttgtaatcttaaaagtcctctctctctctttttatttttttaacatctccttcctctgttttctgggccactcactcaaagacaccccataaaatatttgcccgggaaagaaggcaccttccaataaaaatacctataacctggaggacaagacacaaaagccttatttctcagctctgagcttttgttaaaacctgtgttatgactgggtgaaatgagctggcctcagagaacaggccagaaaacacagggaatcctttggctgattggcatcctctgccattggtgactctccataacccatgttgttgtctctggccgccagcaccccatcagatgttttgccagcttgagttctgagtctgatttctcatgccagcttcatcttggtgttgctgaataaaggagtttcccaccatcacgatacaccttcccctgcccctaggagaaatcttcctccagagggatgggcagccatgtggctaaatgggttcctgctcagaggcgaggaggtgaggaagaacacagtgcatgtgctgagcagagatccagctcctactcctggtttcttccaaaacctgcctgttaatcacctgtttacattgccaagcatgcttgactgggtaatgatagtagggggaaaagcagtgaaaggaacatcacaggttttactcaagtggagtaatcccttcctgatttacaggcatttcggtggctttggtgcagacagagtggctggtctcattcttttcacaccaatggccagcagcccccagaaagcagttggactcttcgtacccctttgatgtcccctcttgggtgattcccacgtggagggtggtgccactgggcttggttgcagtctgccaccccaccttcccagttagcattcccacctgctgttcctggtgactcttggtaaagtcagactgttggtgcctgcacttgtgggtgttatgtgagggacacatggagaccagtttgctgtagtctcttctctcactggcctgccccggtgccatgatctgaggataccacagctgaaagggaactcagaggtcatcaagcctgacccctttcattttggcaatgaggaaacaaaggactaaagaggtgaaggaaattgctcaaggtcacgcagctagttggtgacagggactgcagcctcagccttttgattcataaaccagggatcctttttctctcctaggttaaagcattgcccttttttaaatgaatatatttatttattcagaaattcagcaaatatttattgaactgtgacagagatgaataaagtctgtctccacaaacaactcatagacctggggaggagacaggggattatacaaattaactcaatgtggaaagtgctggtaaatggaggtaagaatagaaggctattctttcccttctccgggaaaagtgcctgacttgtgttttggttatggtgtgtttttttttttgaggagagtcagaaaaggcaccaaggtaacctggagacataaaatagcatagtgacccaggaaatgggctctggaaccagactgccttcatgtgaatccaagcgctgctgctcacctgctgagtaactctgggcaagttgctttttgtgtctctaatttccactctaaaaatgtgaggaaattgataatacttatctcctagatttattgtaggagttcagtgggttaatacatggaaaacactttaaaagtgtattggcatatagaaaaaaacataatagctatcattattattattatttcaagagctgtatttgaatagtatgctgagtaatgagacagatccttatgtttcaatggtgaccaaagatttagaaatgttagcatagttgccagtgaaagatgctggttttgcttggggctcctagggaaaccaggcacgtagatgggaatggacgggtacagtctggaagcagtggatgagaagggatttggggaagaagaaagccagaaggctagcatttcttttttccttcatggttttatctaagttggggccacagaggggtgaatattgttctgttgaacaaacagggggatatggcagtgtctggggctttgggggatcagtggtggtttctgggtatggcttttgttctgaaggagcttccttccagaagtggggacgtgtgcccacagatgcctgtgccctgaagaggtgcaacaacgaggtttctcttttgggaaagaggagagagaccagtatcttaagatgttgtcatctggttccaattttctctcctcacctctttagcatctcttacctaattatttgcttcctgaaagcatttttctcccaagagtaggtgcccagagatgcccttgggtataggatcaatgcaaccgagcagattgattcctccaaacgtgaaccctcatatgttagatcagtggtccccaacctttttggcaccagggactagtttcatgaaaggtagttcttccacagtggtggggggatgcttttggaatgatccaagcacattacgtttattttgcactctctattattattacattgtagtaaataatgaaataattacacaactcaccataatgtagaatcggtgggagccctgagcttgttttcccacaactagatgatcccatctggggtgatgggagacagtgtcagatcatcagacattagattctcataaggagcatgcaacctagatccctcgcatgcgcagttcacagtagagttcacgctcctatgagaatctaatgccatcgctggctgatctgacaggaagtggagctcaggtggtgatgtgagcgatgaggagtggctataaatacagatgaagctttggtcactctcccaccgctcacctcctgctgtgcaaccccgttcctaacaggccatggactagtactagtcgtggccctggaagctggggacccctgtgttagaccatttcatatgggctgcattcttttttggaaaatgaggtggttgcaatgcatggttcttaaggtcccttcttagcacaaacattcttgttcttgggccctggtattatggatattatacacatggtttttgctacttgccagggatccgggaaggtctgtggcacccggtaatttataattctgctgaggcaaggatttggccagaaggagtcacatggctggtgagtcaacttagctgatcacccaatctccacactcagttcctggcacttactaactgaggttgcaaaggtctctgcatcttctccttcagaatgttgaaggttggctgctacatcattttcccttagatttagagaagaaaagtttttctactagagctcatatttctctcttcttccatagcggcttttatttaaactattaggagagaaaaccctccatactcgaccacccacctccacactggcacaaatccagcctaaatcagaaccgtcagctcaccctgagccgggctgtggacttttcttccaggcaggtgggataggaatgggagttgaagtttgagcaacttttgaattattgcagttacctggatatatgatgtttttctgctgtgtataaagtgggctagaaggatcctcactcttccacactctgtcctcctcccaaaagaatttcctatttgttcaaggtgcaggattgacagcccaggagaccttgtgtctccacctgggcaggtcagaccatggcctatgtgggtggcttgcagcatgtctgtggaaagtgggcacagaccacctttgagggacaaaggggcggttgtctgagggcccctttaggagctcaccttcctttgccctactatttcctgttttgttttgcgttttgggatgggggggtttggggatgtataggccatgcttgttcaccctgagttgctgtcctttcttcccataacaatgtctgaagaaagaagaggagggtgggcttgaaattgtgatggggctaatgcttattttgaatacatgaggtaattttttgggtttttgtttactttattcttgctgttgaggtataattaatatagatgaattatgtgtttggttccatcagtcttaatagtcatgtccactcatgaaactacctaaagcaagctatagaacatttgcgttatttcagaaagttcccttgtgctcctttctagtcaattgtactaccctgcctcccatccctactcccacacctctacccagaggcaatcactttctggcttctatcaccatagtttatacacagggtaattttaaaaagcgtgtattcactgcaacctgtgtaaatccaaaaagggttacagttctttggggactgtttttaaaaaaatcagaaggctggagctagaagcagctttctcccataccttgaacaaatctttgacaatgatgggcctaggtgacctgatctctaaaacaattataataataattcctaccacatagcagaaaatgataataatagctgcatactgttattgaccacttcactcttctgaacattttacttcattatcttatttaatcttcagaatgacaccttgagatgtgtaccattttttctattttaacacatggcgaaaccagagctttcagaggggaagtaacttgcttagggccacagagcagtcagtcataattcaaatcaggagcctttgtgtccagggctttaacctagagcaggcctatgagagacggactcttgtgaactgaagtagcagctaagcagaggtcattattattttaaaagcagtatctattggtcagagaggacagtcttcctttttttctattttattaccttttaaatatttacatagaaaaaaatctagttttcagaatgcttgacatcagtgggtatctgcaaattagaactgtgggtactaagtttaagccttgtgctaccaacaggaaacatgaaaaaaagtctgtcgttaagactgatgcccagctgggcacggtggttcatacctgtaatcctagcactttgggaagatgaggtgggaggactgcttgagcccaggagtttgagaccagcctgggcaaactccagatagggagatcccatctttacaaaaaaaactttaaaaattagctgggcatggtgcatgtgcctgtggtcccagctacttgggaggctgagacaggaggatcagttgagctcaggagatcaagactgcagtgcgctataattgtaccactgcactccagtgtgggtgacagggcaagaccatgtctccaaaaaacaaaaaaagactgatgctccttctacttgtttctttcccacagaaaagcattgtgatggatctgtaaatattatttataaatataaatgacaataaagtgaaatattaattgatataattatcagtgatataatttaaatttttatagctatcatttgagttcctaatatgtgccaagcatatgctcagcatttgacatatattatttcaacatataatgcataagagacattgtattagttatctattgctgtataaccaataaccccaaaatttagcaggttaaacccataaaagttcattatctcatatagtttctaagggtcaagaatccacatgcaacttggctgagtggttcatgagattgccgtcatgctgtcagctgcatctgcagtctctaaaggcctgaccagggctggaagttctgcttccaggctcactcagtgacttttggtaggaaaattccttgacatatgagcaaggaatccatgagtctgcttaagacatggctttcccagtgagtcatatgacagaggaggagagagagagcccaagatggaagtcacagtcttttataacctaatttacagaagtgacatgccatcacttctaccatatactattagtcatagagtttgactgtggtaaatataggagggactacacaaggatgtgaaagccaggaggtggaaacactagggctatcttgaaggctggttaccataggcattattagccccattttactgctgagaaatgcatgctcagagaggttccataagttcccaaagtcatctacccaggaagtgagcaggctgggatttgaacactgatctggtgaactgcactgcctgtatgctttccagaatgaatacccaatgcagagagtcctggaagaacgaagtgcatgcaaccctggctttgggtattctagcatgtttctgagggtgcccccggatggctgtttgctcacagatacctatctttatatagttagtatgtccctgaagagcagggcataaaccaaagatttgcaaattcaattcatttcagattcatgatggaagttcaatatttaagggacttctgcttatatcttcctgtatcacttggtgatttatcattggcttttaaataagcattcaggtagtggagtataccagtagtattgcaattgtgggtgaatgaaactaccctgaagggaagattttgtttttctcttctagagtaaatgtggaattcaatcttatttaaaaatattttgagatccaagaaggatactaataaaccatgtgaaagtctagttatgtttaagattctaggtggttggtgtatagatggtgttttcccagaccatcccaagccatcctggcttaccacatccagaaaagggcatttttatagttgcctccactgcaagaggacctgaccactgagatacatcttcctgtcgtgacctacttaagggaatttcattttagggaaagaattcaggaagattatatggtctgtagctggcctattaaaaatgtaaacatctatctgctttttaatgtccataccaagcaaataatcaaagttacacatacttctgaagctccttttctttggagatctcggactattttatagaaacaggaaaatgtcacctttctagtcctgtttaccaactcatttttcttattaatttgctaatctgtcctgcctaggttaagggaatttgttattcattctactcatttactcatttaacacttatttcatacctgtcctgtgctacatgtaataggtataaaattccatactagatatgaggggaaaaaagatgaaaaagactaatttcctgccctcagggagctcatagtccaatgggagattcaacaaagagaaagaaggttacaactcaaggtaatctttgatttgtcaggagtcatgcaggaaagagtaatttactctggttagggagtactgaaagatttatcttgggtgatgatggatctagaaggatgagggggagtttgctaaaagaagaagcaaggaagggaaatgaaagtttggggtggtggtggaggagtttcaggtagaagaaatcattcacaaaggcataaaagtgagagacagcctggtccattttggagcaagaaattgggccataattgatgtttgtatctctaccttccagagtctcagaaactagaatgtttttctaggactgttccaaatccaaatgttgtctacggccataccacgctgaacatgcccgttctcatccaaatgttgtatcatttatcacccaaaatatagtgtatgacaaggagctcaaaacttattctcaatgccatgactaatagtgttttaaaactatatttttctgcctggtgttcatcatgacccttggggacatatctgggacatgtcacatgggctcaccatgagtcaggtatgggaatgtcacatgtcaaactacttttgctaatcaaatacacaaaatgctgattccctcactgttcttgagatttgcagcagtcacaagttccagtttgctaagaaattctcctatgcctgattggttatattattgtttccatctctttgcatcattagggccctgttgttacaagaaacagcaaaataaaagtatttctcttttcgttgtggtaaattggaaataccctagagactgtcaaagagggatgtgaaaatatttcagaaatattatttcatgcctcctgactacaggatggtggtgaggactcctttgtctgaggcacttagagctgttgaaggtgtgttgcctggaaatgcacctcatgggaagacttgcaggtgtgagcggttgcctaggaatgtcatttcaggattggtaagtgtgatgttaattttaggtgtcaacttgactaggctaagggaggcccaggtaactggtaaagcattatttctgggtgtgcctgtgaagatttccagaagaaattagcatttgaatcagtagactgagtacagaatatctgccctcagatattcatgcctcgagtatgcatcatccaatctgcagagggcccggtagaacagaaagatggaagatgggtgaatttgatgtcaccttgagctaggacacttatcttcttctgtctgtggacatcaaagatcctagttcttgggcctttggacgctgggacttacacctgtgctaccctaatcctggttctcagacctttggactcagactacattataccactgactttctggttctctcacttggcttttggagatggcatattgtcggattgctcagcctccatgattgtatgacccaacccccataatgaatttctacatatatatatcttcttggttctggttcactggagaactctaattcagcaagtcaaaggaggaaagtatattcacctttagtttgtccctactacttagtgattttattcacttctactttaattcaataagcattcattaattcacttctaatggaccatgaatagtgctaggtgctggaaatgcaaagattaatggactatgattaagacacagttcatttccttgaatctcacaattgaataggggaaaaggtacaaggaacggttatactatggtgcaaagatagatgtgtacgggggagctgggcacttcgctgcatctgggagggcagaggaggctctgaaggagatgataacaaattggatctgaaaagatgagttaagaatctgtctgacccagaggtttcatgggtctttaagcacattaaggagacttgagtgtggtttataaggtatgatttgtacaaaaagcacaaatcatattcctgtaaacacttgaaagtatcacagtttcacatccatgtagtgagctgtaactatgtttattgtatatttattgtctattttacagatgtgaaagcctgagaaggcagatagataaatgttacttgccctaggtcaccaaccagtgattagccactgaggactgaaacccagtattttttttcttacagtaaaacccatgcttatggaagtccatactggacagcagtcttgggtttggctaagctctgccaccactaatgagccctgtaaactcggacaagttgccaaccttctctaaacttaggctttctcatctgcagagtggagggagtaggacttgaggcccttctagctatgcagtctgtgatttctagagacagaacagggaagggcaataggggtgacaggagagaccagaagctgccgtcacaaagactagctttatggcaagcctgtttcccaaaagcacaggcccttcagtggccagtgaaactgatgtgtttggatttatcaagtagctttgccaaggaccagctggcagaagaaagcaaaaagcagcacggcagatttaaagatgagttcatttctatggtgtcagccgcagagggtgcggtttccctgtctctagagtggtggacacagtctaccactgtgtttcttcgaggggagattgtgcatgtttcttcgaggggagattgactgtgtgcttaggcagtaaacatcttctgggcacagtgtcactgggaggatttttgtattgagagggcagtgaggcgtgaaacctcagactcctgtggtacttcctgctacccagtgatgtcagaggcttgctgctcacagtccccagcttagggccctgtttctccagctctctgcttacatcatgtgggagaggagcagcagccatgagaaaacctagctcctggaagtgcagagatagagactgggataaaagaggggggtaaaaaaagaattcattaaatttggccttgaagatggttatttacttgtttgctgtgcttgctaatatgccatatgaatagaaaagaggctgatttttgatgacaccatttcaagagtatccttcatgatgtccaggttaaaaggtttttgtgggtttcttaattttgttgtttactgactgggcgtggacatatggactcttattttttttctggttgcctttgctacatttacaggcttccgtgtttctaagaaacgaagcagctgtcttttcatcaattaatggtatcaaaagtatcggtaatctctggatggtgctatacaaagtgggtcaagagatatacagtggtccccccttatctgtgtcctgggaatatgttccaggattcttggtagatgcctaaactgcagatagtaccaaattctatatatactaaacatgaatttctttttccttttttacaatttcatgcatagaagattcatttttactgtagatcttagtgacctcagcatacgatttttttctttcctcattaagtcaagatctttttcaccttttcacttcaatcttttaccttatcactttatagtttattggcaaatccaaatgccagcatcactactcttgtgcttttggactcttagtaagtaaaattaaggttacttgaacataagtgcgtgatattgtggcagtcgatctgatcaccaagacagctactaagtgactcatgggcaggtagcatagaaagtgggaatatgctggacaaaggggtgactcacattctgggcaggatggagcaggatggcccaagatttcattatgctactgagaatggtgtataatttaaaacttacgaattatttctgcaattttccattccatattttcagaccatggtaccttgggtaactaaaaccatggaaaccaaaactacagataaggggggagactactatattctaaaagtttataagagaaagcaatttgatggtgatatcaaatgccattgcattgatctctgcaaaaacccttcccattcattaatgcattcctcatacatagacatatagcctcccatcatcttcacacaccacagacaccttacatttgtgcacttgatttttgtgaagctgatgtttatactgatcatgttcaggatggggctcctgtagcacaggggaggtttttgggacaggtgggtaagagaaatataaggaaggaagagcaaaaaggacttgattctttattgtttatacaccaaaaccactgccttatgcataatccctccttctgggcactgggtagtgagttggcaaagtgagaaagacgaaactggtagttacaaatattctacaaattgttagaataaacactggttttcatttgagttggccattaggttggaatctgcttggccaaaaggtcaaaaccctttctttggcaagagtgatgcatcttaagtgtactttattttgccaagtagactaaagaccttcaaatctttgacagaggtgtgggaaatcctacagcacatgttttctctcagtctagaaaaactcctggacgtggattacaggagcttttagatcttagaatgctctttataaaacatatttggatgacacatgacatggagaaagttatggcatgcttgtgttttatgtaagtatgtgatttgatcagggcttagaaaagtttatcaagctttttagatataattttgtaatctctcaagatagagatggcatttaatggcgggatagttggccaataaaggtcactggacaatttaacagaatgttgcattcttgtaatatattcttgttcttctttgaacacaggactattactcagatttagaaatactagttatctgcatttttcttcattgtctctgttagacagtgggatatagtattgtctttagtttggctacactgctgggcttgaaactgtgggtaaaggctaacactcacttaagaaaataaaccatgtatcttggtttcatgaagaagatggttagacctgagaaagaggatgatctctgttgaccaaggtggaatttgaagtggaggtagtgtgaagtcagggtgaggttttggcatgtttagtctcccagacagaaaagatgaaggccaagaattgatattcacacatctcgattaggtacctggcatatcattagcctttcttgaagtcattgattcacagactgggctgatagtgaattttgaggtgctctgtcaatctcttctccctgtcattttcccacgaaggaaccaagtctcagagttgagatcattaaccgtgaacatttaccagctgttaaatagatatgttctttgataactgttgaaaaattttacaattttttcttttcgtcttgattctaggtgccctatgattttctttctattttgtcttgccttttttatttgatttgatactgagtgttttgtgctcagaaaataatacccagtggtgtcttggagttggcatctgtgagattagaactatgacccctctaagttctggataccctctgttcagtaaaagggctcacaggtcgctagatggacttggaggtcctgatatccagcctcctctaagatgaacgcttccacctacagtgccctagatgagtggctaacccctgcttgagtctttcattcacaatgtgcttcctccttaaccaaaaaagccactcccatcattacatattagatttcatatcatatcatatttattcaatgacttctatcagattgttaaaaaataaggatattttgttaaaaaataatataaatataccctttctgaagttgttttgatagctcctttgatagcaggtggaatttttaaacaatggctttggtgcctggattgtgaggattttgcttggattctggtggcatttctgaaaatgtgactaatgacccctccagtgttctagaatctgtgttcagtaacttgaactccatgccatctgaagccttctccaaagtatgtgctgggtccctcctttactctgaaagatttccataacacttggtagacactaaagaatgcttcctccaccttctccttcattataaactgacttgttggacttaacagttcctttctcatctaatcaaggagctggattctgtttctcaataatgtaatcacagtaagatggtgatattggcgaagcaccggaaatgactggcaggacactggggaaaaactgactagtctacagtttccttagaagacagcctgaaattgcttataagcagaggggagcaggtcactgaaaatgtagactcgtgtgtgaacacatctaacccttgatttggggggcattggggggctgctttctggaaagccccttatgtatgccttgcacacccacatctcaccttggagccttatttcagatgcagaataaaaagaccagagttcgagttctgactctctattaattattagctgttgagcttgggtaaatcccttaatctctttgaggttaataataactaccccagagagctattaaatgtgtcaaatgaagtaataggtatgggaatgctttgtaaactctacaaggtcataaaaagtcaagctgttgttattaacagtattttctgtaaaattttcctggctattccagctctcaggattttgcatttctcttattcactattggtactgccctttggccctttcacgtattcatctgtgatgctggtcagcccttcccctggatagaaattttctctctagcaagtttatggctttcatatttttaattttgtactatttttaaaaatgtaaccttcgacaaaataaaaggatatgcataacatacataaattttaaagcataagactgttttagtcaacatttattgagaacctatgaaatgcttgacattgtaccaggtcctggggatacccagacgaataagacaacccttgccatgagacatctccctatctgagagtgggcacagatggcagtgttcatattcaataaacaggaaaaagggaagagaggcttttccacttagtgaaatcgaggctatgttctgaaagtgtttactgttttccacataaagtttccttgtttctcggttccttctttctttttcctaaaatgtaagctcaatgagtctttaagctatgtcttccataaatattttttgaacacctactgtggagctaggtacccaacaggacatcagcagcagaagggcagagatatttgtctcttttgttcactgatatattcccagacaatatctgctacatagaagtgcttaataaatatttatcaaatgaactgtcacattttattagttaatactagctgtcataactgataatccttggtaactcaaactcagcttaataaaataaaagtacatttcttgctcatgtaaagcccaacttgaagtagattgaatgaccctgctccatacagtcattcagggacccagcctgcagaggttctgccatcttcaacctgtgtcttctttagttaacttactgccaatctccagccaggagacagaggagagggaaggcgtggagggttccaaaagggcctttttggccggagctcattctgttgtctgctacatttagacaactggaggggttggggcaagaaatgtagatccttgctggtctcatcccagcaataattttgcatattgaaaggagtgcacaaatctttgaacagctggccatctctgccttatggacaaaatgccatttgttttctgttcacatgtgggtctttcatgacctgtgagctccttggggtcaaaggctatatattattcaattctgttatccctagttcctagtatagtacagcaggtaaatagatgttttctgaattgaaagtaaaaaaatcgtttttctgttggatgtcgggcaccataatagatgcttacatttttttttttggataaaggaggttttttttttaaaaaaaggaaagaataaaagaagaagaaaccatttgctataataaagatctgcaaagcatggtaccgggttccaggatggtaggtgttcaagaaacacatattgaaaaaaagggaaagaaaaagaagagaaagagaatgaaaggacaaaggaggagggaaagaaagaaggaaggaaggaaagagagagagaaaaaataaaaaggaaagaagagagggaaagtagaaaggagacagaggaaagaagggggtgaaagagaagttgaacaagaggaagaacagggaatgaagtgagagagggagagaaaagagggaagagagagagaacgagaacacaggaggttcctgagaggtaagttgtgtggcgccgtactcactgcagagggagtttttccccctgcctaggaggtcagggaaggcttcccagagagaccttgctctttggcttctgcttttcttggtccttctggcctaatttctgcaactttatgatctgcccaccccaatagaggacaaaaatatctccctgttgtctgatggggaaatgaagttaataaatctcctggaaagtttgtgcttctccatggaaacagtacataaagtactcctgccacccaccaagaagcaccgggacgggcaaagctctccatcacacaggacctgcttcttcaagcctacagtttctcaggccaggttctgtgcagcccagacacagttgttcagatctggggtgtggaccaggtggtgccagaggccctaagaatactctgtttactttgccttcctcatcagtctctttcattcctaactcactgagtttctccacaaaatccacattcagaagattttcagtaatttgactgactgtagcagcatacacagccatgagtatactgtgcccagatgcctgccagagtctcccgaccacaaacccagcacgttgatagttgtgtccttgccatatacacagtggaatcttttgccttttctttccttttgtgcctttaacattttcccctttgtatctcctaaatttgcatactttgtagcaattcttcaaaacgatattaatatgcccattttatagatgagggatctgaggctcagaaagtttcagtgtcttgtttatgctgcctggcatcagtctgaattgctccgagccttaagcccaagcctcttttcaacagtgctgcagccctgtcaaagatgtacttgtgaattcaaaacagcactcaggcatataggttacattggcaccaggaaacctaagcagtatttccatgaccaaattctaagtgaattcaacaccaaaggagaaaaggaaatgttctttgctctctgtatagattcctcttctgcttgcttgggttttacaaagttcttctaatttttatgtgcgattggacaatgcagttttggtaaagttgctaaaaccataactgttactcttggttttaaatatcaaaccaggtaaaagggagggaggaacttaatgttacagaagggaaaaatgacttaaatatccgaacagacaccatatgggaggctttttactcccctttcctcctttaaaaacagtgtgttatttctccctctagattccagttactatggagggatttaggatttagtgagactagtgttgctgaattagctttgtaagacaagtctgtttactttttatactaattttcatgcttaccactgactctgattagtttgaagaaagctatttctaagaatctgttcttaacattatagaaaggaaaagttggccgggcgtggtgactcatgcttgtaatcccagcaccttgggaggccaaggcgggcagatcacctgaggtcaggagttcgagatcaccctggccaacatagtgaaaccttgtctctactaaaaatacaaaaattagttgggtatggtggcaggcacctgtagtcccagctacttgggaggctgaggcaggataatcgcttgagcctgggaggtggaagttgcagtgagccaaggtggtggcgttgcactccagcctggacaacagagtgagactccatctcaaaaaaaaaaaaaaaaaggaaaagttaatgatttaattttctttagctgggcatctggtaaccatgtatcagaaggtgaagcctgtgaggtgccttagagagcatggaatgctgcccccatcccatggattaggaaattgaggtctgtgtaattaatatgaataattattaccatttttcttacattaaaatatattaaaaaccatagagaaaaagacacaggtgatctgcaattccatgtctaaaggaagcccctattaatatttttatttaccactcatctattttctattcgtatgcattatatattaatttaacatcttgctgtatgtatctgttttgaaatgtaatttaaaaaaaatctaaatatatcatgaacatgcctcatgttatggttgcattcttcatttatttaacaaatgataatcactaacacttaacatggctctgtgggccaggcattctcctatgcacattacaaacagtaactcacatatcctcataatgagcttctgaggtggtagcattattaccgtcatgttacaggtgaggatgctgaggcccagaggggttacataacctgcagggtcatgcagttaggaagtggcagagccagaatggtcacccattctgtatgacttttctgtctcccgggacctggcctggcccgctgtaagctagcaaacgtgtgtgctgaatgaatactggtgtttaaaagactgacatggtgcatgagaacagggtcttcctggtttggggaatggtgctgattcacacttggcatgtgtttatttcctgaaggttctacggccagcagagctctatcctgacaatgtttctgaaccaccgatcacctacaggtgtgcagaggttatgacacagcagttttacacttggccttgggagttgttgtccggttccccattatccccagtttacacactttcactaagtcaagattccatgtctgtagctgtaatagcagtgtaatagcactgtgctcaagggcctggagtgttccttgatgtgttttgggatttctagccaaatgaactcagtataagttcatctcacttttcagattctaatgatgtctttagagattttgtcctaaatcagtgaacagaatttgattctgagggaatttaatttggaaaaaaaaaaaccacccagatacatactttcctccttgtagagtaaaacctctctttattaatttttttttcttaaaggatacattagcccttttaattatatcttttgcttttctggggtccagcataacctattctgtatgggttatacatacttccttctatcatatattaatgaatacaactccctttagatggagattgtgctagctagtgtacaaactagataggccctgacctcaagaagctagcaagctagtgagaaagataaataaacaaagatactctgttctgtttctttatttatcctaagacatatggataaagagtaaacaaaggatacacgactctaaatactgcaatacagtatagtggagaaaggttgagtatgaacttgggaataaggaaatatctttttttatggtgacgttattgaaacatccaaaccatgatatatttaagttatattttcgatggttggacttcaaggcttttttgaatatattcagtttaagtctgcagataataggaaaagagcttatccttagctttaaaaaattctttgttcatagctatttaaatggaaaagaaggaagaattgtcatatgcaacattttaaatataattcatagtttcatgtgaattagtggaattaacagtaaccagggaaacttccgaaccttagtgtggtcagaccctagtagacaataacagaccttttttttttcttttaagagtcttgctctgttgcccaggcaggagggcagtggcttaatcatgagatactgcagcctcgacctcccaagcttcagtgatcctctcacctcagcctcctgaatagttgggaccacaggcacatgccaccatgcccagctattttttttttaatttacttattgtagagacaaggacccaccaggattcccaggctggtctcgaactcctggctccagcagtcctcctgcctcagccccccaaagtgctgagattacaggcatgagccaccgttgcccagccaaaagatgtggattataaatctagctccatcactagccacagctgtattacaatctgcattcagctgtgagttcagacacctgaaaagtattggcttaataagttatggagagttcctaaaactcatgttttaattctctcatgtaatgaaaacaggagataggcagtagacatttccatggaaactgacatttccatcccataatgtcttctgggacccagacaccttttctgtttccgccagtcatccttagtgtgtgcttctcatctgtagtcctaagtttgctgatcctccttctgcctcacgtccatgttcttgttagaagaatgagatgggcaaagtgtaggcacaagctgaatcagccctctttcaaaagcttgctcagaaaccctacctagtcacttcccagtccatctcatgtgccaaaaccatgtcacatgaccaccctcagctgccagggaggctggaaaaagctttttagctgagcacattgttgcccccaataaaatcagggttctgttaagataagggaaaaggaggggctggatatcaggtaggagtctactaatctctgccctatcagctgggaaataaacttaatcggcagttagctaacttttttgaatgcaccctccctgccttttcttcattaaatcttcacagacctaggttcagattaaagtatattttctttagttgaatttcgggttggagtgccagggatatttctcccttccactcccacttgatgatgtcattcatttgaaatatagttgggttcatttatttagtttgtcttccattttaggtttttttttttacccacttcactgattttatttatgtgtttgtctgtttatgtgtgaaacattcatatgttttggaagtcagaatgatacaaaaagaaatactcaaagacatgtccctctcatcttccttctgctcctttccaccctcccatcatttccacctcattcctgctcaccccatgtccataggtgctcagtctcatttgtttctggtttaactttactgtatttgcttttgcaaaatgtgcacagattatataactatatagctatataagcatatataaacataactatatatatctatatagttgtatgacatatagatatatttttatatatagatatattttctcattctctttttttcttacacagcaggtagcatactttagatattctttactcaagagtctatgtagatagttataagaaacgaaataatcatgagaccagggagaatgacaggtgtccagtaaaagaggtaaaaccaaacaatacaagggagagacctctgcttaggaaaggttttatgaaggaggctgcatttgagcagagtcttgagaatgggggatatggcaggaaagggaaggatttttctagacattgatagaagaggagaacagtcagggaatggtagggaagcggggccaggtcaggggcatcagttcaggggagccccatgatggagctgaagaactcaagtctctagggaagagtgtgacaagattgcgatgatacaggaagtgaaatctgagtgttgtgtgctttttgtggattacgggtttctagagaatttagacatcatctagtgattcattttaaactgacgttgtgtgcccatgttatagaggaggaaactgaggcccagataaacaaggatcttgctcaaggtctcatagccagatgttggcagagttggaagagccatgcccttgactcacagtcccaggctcttttcctcaggatttccccaggatgtaaggtggcccctgtgcttcatagacctggcagtttttcctttgccagcttgtgtctggacttctcaattcatttagtcccaagtctccaaatccaaccagactaacagcaactttaaaccagcctgttatgaattgaggtgtgtcccttcctccttctctttaaattcgtatattgaaggcctaagcctaactctttaggaagagactatatttggagatggggctgttaaacagattaagttaaaatgaagtcattagggtgagccctaatcctatttgactgttgtccttataagacgaggagattaggaaactcatccctacagaagaaagaccagtgaagatgcgaggagaggacagaagacagccatctgtaagccaaggagggaagcttcagaggaggccaacctgctgatatcttgatctcagactcctaatttccagaattgtgagacaaattcctgttgtttgattctgtggcacttggttatagcagccctagcatatcagcccatgccttaacctacattttaactggctcctcgtgggatcgcacacccaggctggtgtcttagctcctgcttgttacagctcctcatccttcctgttgttaagagccttccctgggccctatcttatgtcacctactcagccacactgcttcagaggcaagagagtagtggaggggagtttgtcttagtgcagagaacatggagggcagattgggagtctgatggagccactcactggccaagaaaataaattgcctaaccttctggattcaatagtgcagttgaactaggaatctctgaagccatttccatctcctcaattctataagcaatgtggacacaaactatttgttgattttaagtgcatactcagggatttaaaggtattttttaaaattatgctttttagcttttttaatattctcaaatgttttgccttactacagaccttaatatacccaggatattaacaagttttaaaaatcaggtgatgggattatgagttttaattttcttccttatgctttaagttcctctgtatgtgaagaaaactaatcaactttctaatgcagatggtaatgaaacaaagggtatacaagtttatattaattgacatatagcatgcagaaacggatgtagtttttaagataataaaatgtgaaaacactagttaagttgaggatggaaaaagctgtcacaagatatctataatctgttgtttgggtcatggcaaagcatacatggtaatagacatgcaccatcatggaaaagctcatcctattgacgttctagcttgaccttaggaagaagaaggtgcagataagagtctaacttaaaattagaaaaaaggaactaaattcaaaaattataaacaaaacaaccaaatagtctcataagaaaaatgcgaaaattttgctgtaatttatagctcaattcctcaagtaacaggaatttttagttacttaactcgataataattaacataaaataatgtacttgaggttattgggacttcatagatcagggaatatcataattattactgataattagctaaatgtaatcaaacggttccatttagaatgtttttaggtaatctggattcttgttatttcctatagacattttataagcaaaggtggaatacaacatgcttataatatggggaagaacagatcttggcaaatgggattgttttgaggccttgttctagggcactaaccaaaacaaactagatgaaaaatcatccacctctgtgaacgtttcagagtcaactgcctgttctacacaccctcagcctcatagatacgggtcctgataacccgaagtcctatgctttggtatggattacaggagtgatctctcctcctgtgtcctcttttgtagaaagcaaggatcattttgtaaacatctggtttcacctcagaagcgcacgtgctatcaagatttgtgtgtatgtgtgtgtttgtaaaagacattttatgtatgcctgcgaatgacctttccaagaatcttgcacagcttgtggctattcaggcctgttccatggatttttcttcaatgcaaatccagctgtgtcagttcccgtaacccctcctgtgcctgctcaaggttaagcgctgcagtctgctctttagtaagtgtccagagggtaattacccaggtgcatctgggtggggtttaacccctttcacccccaccctgtctgccagattcatgggggagattcagatgtgcaagagaggcagttagtgaaatcagttccctctcttggggtaatttgatcttgtcaaacaatgctttttacagaacatatgtgctttagttttattttaagtttctgaaataccattctccattttgctcaccactgaggcatatgtacaaatccaaagaccctcttttgttacacgtgaaactttattcttatttttttgtcaaaagaaaagtcctaagtttcccaaatccaaagcaaagtgaatgcttcaatattactttatccagagccacaggcaggagagaaaagttgtgaaaatcaattcaggaaagaccaggaggaaaacaaaatgatcgccccagaaatgaatatttaactgttgtttgttggttggatttgggagaagagaaggtaaaatggtttaaaaggcaaaatattaaactgcttagattatggacagctctctccacagctttcgcccccagatactttgggtctcatgatgctagaatatctgtcgtatctcagaggctaggacattctaggctgagagtggttgttataatattttgcccaggagtatggtgtgggagcagcacgttggacagggacttggcgatgttggcaaataataagcatggggcttgggcggccggctggtgattgcttaagccaggcaaattacttaagctttctgagcctcagtttccttctctgtaaagaggccattgattcccacctcctggggttattttaaagatgaaatgaaaccagctatgctaagtgttcagtgcttgccaggcacattacacttaagtggtagctgttattttattatttaaaaagatagctttgccacaaaccagatatgtgacattgagtaagtcaggccatgtaggtggctgggctgtggttttctcatataaaatgtgaaatttagagctatagtcccttctacttctaaagttcactgagcctttgaatcccctcttaagcattagttcactggaagaatagtttctgtgcctagcagtgtgcaaggttgccaaagttcagattaaattcttaccaggaggttactagaacttgaaacacttcttgtgcatggatttcaatgtaattaatcatttgaaaggtgaaaacatgtgttccaatcctgggcagtgacttatcccagtgcccaggtgagttactagcaaatcttaggtcttgggcagttctttttgtcctgataccaaagctagagaaataaatctgctttatggctcctcagtcttatttatgaatcaaaaaatcctttcatatccaaaatctatattattctgcatctgaaacttttctgatcttcttcactcctttacaataatattatctaatgcatagataatgcatggttgcttccagagtactttgatttatataattacactcacttgctcctcagaacaattccatgtggcaggtctgttatcacccccaattcacagataaggaaactgaaggctggatttgctgagatcatatagccaagagttgtcggatatgggttacatactcatgtctttcactgcaaaacacacatttctccccctgaagcaagctccctctaaagtgccagagtattttgtttatgaatgaggagtgacaaagcaaaaaatgaggtcacagttggaaataggatatggaaatgctggttccttcatgacccacaggctcagatctgtgattcccaacatctttttatatgagggcctatttttctttggtaaacagaagtttattattttattacacaggcaaaatacagatgtgcaaaagagaaatatgttaatactctggtgattattagtgttaacattttggtgtcttaacctcttcgctcccctgtttatgtatttatatgtatagggatgtgtattcaccagaatgttcttaatttgcacatactgttgagaacccatctttactaacaaaacatggtggattgcccacagatagttgtatgggatctagattttgcatctcccctgataggcttatcctgcctgcctcttgctgaattttgctagaaagttgttactaccaccttgtactacctcactccccaggggaaaactgcagctcagtctgcgtagctcctggtgcagcagaacccagcagtgccagcagccaggcctgatccggcccctaccatgaaagccctgacttctcccaccatgccaggactcagatgaagaatgtgccagggagtgggaagtggtgtctccagtggcctccatagctactgatacaatgcagaagtgcagggagttaaggcccacaggtgaaccttggccaaggggagatagaagcgcaggagactgttctgacccatatgtggtttccatatagcctttgtcttggtgacctagcaaacaggcacttttttgtgaagttgtgacagcttagtaactaatgcaccactctatatttgctctatcttgatgtctacctcacctcctcctgccccctgcgcacctgctttccaccctgggaaccccacccctgccccgataaagcttgagcacgaatacttttcctcagctccttcttttctcttttttaacttaggaaactgagctgatggtcattacatttatagtatctctgttcagtaagtacttacaaacaaaaattcaattgcttttagtgaatggattttattaattacaatagcatctgtatgcacttgaagaaaagtagtatattgatgttatcttcagatgccatttggtgataggtgaattaaaggattccttgaagccactctgtgcctctctctacctgcatgtcctcaagaagaagccacagttgggttgtttaggtgagatacaggtcatcatagctattttaccctcaacttgaccttcgtgctgtagttaaagactctcagacagaaacctcagtccatccagtctcttcctccagctgcctttcaagtgcgtgaagttttgaagtctgcacacgttttctcagggtgaggcactgtacacatctgggtcagctttattccagttttctttttttttaaatatataaagtcaatcagtgtgagtaactgctacatgagaccacggagaaaatgaaataaatatgttggaaatgctagaaagtgatctgcagttgtttattcgcctcagtctcacttcctggcttattttaaagcattcaaagggtttgaacaatcttttgagttgtttggcgtgctgcaaaaaatatggtctgttctctaatatgaaagaattttacactgtgcttcctggcctggaagtgtgtgggagagtgaggaaaacagggagaaactagtctcaagggacgggacctcttgtgctgattaacattctcttaacaaggcacttaatctattatataattcagtgcacttaatctatgaagcagtattcacggggctttcttttgtttctcaaggccagggatgctgtcttgtacatctttgcactctccaacagtgctacatttaacaggtactagctgcactctttgaatgatgaggtggttggtgaacttttcagctagctaagtcaattatggtgagttgcacaagatgcccatgttacaaagaataaatgctagaaaaatgatttatatatggacaaattactgaccaagacaatgtccttgtttgtacaatggacattgttcaggcagagctcatgggttgcattcacagaaagggctcattggctggtttaaacagaaaccaagaagagaggggtcaatgaaggcaggactggtgaaggaaggctgtgtccagggccttatagggatgaaaggggatgagacagtggacctatggactgtgaattctgagttccagtctttgcctcttgaaatttagtgtcacttttgaggcctgtcccctccaggaagcttttcctgatccctgaaccagttaactaacctcctatgaccccatagccctgtgttgggacctttatcctggtgtgctcctgcatggccatttgtgttcttcctgataccgtcctctagatactaagtcatgtctgtgagggctgcgctttttctggttcatccatgtgactcccagactgccttgcactcaggccactgcacaaatgcctgtcgaagtagacgttccaacccaaaggttcagaacaacaaggacgtgcatccagcctttgtagtgcagtgggttgaagagtgatgccctgaaaaagatgtggccacatcccttctcaccagccctgggctgcattctatttaacagttttggttttttacgtcagagaaaaagagatgacttttgtataagtcattgttattgactctgtctctctccaacttgagaactgcaggaagattatttgctcattgcctggccttcaggtgtctgatggaacaggaatcaaatcatagacactttgaacctctcctttgccatgatgcttggacaaaaaacttgtggcctcaattctttaactgaggagccttgtagaataacctctggagttaaacatacctgggtttgaacctcgactattactcatttctgtggtgtggcctaatctccttatgcctcagtgttctcatctgtaaaatgggcataacaatgaccacctcttacagttgttgttctgggcattagaatgatactctatccgttagtacaggggtccccaacctcaacatctgtccagggctagttaggagccgagcctcacagcagaaggtgagtggcaggtgagcgagcattactacctgagccctgcctcctgtcagatcagcattagattctcatagaagtgcaaaccctattgtgaactgtgcatgccagggacctaggttgtgtgatccttatgagaatctaactaatgcctgatgatctgagatggaatagatcccgaaaccatcccccccacccccaaccctggtccatagaaaaactgtctttcatgaaactggtcctcagtgccaaaaaggttaaggaccgctgtagatagtagatactgttggttgtagtattgtgtcattacgttgtttgtactagtgaaatcactaagactcttgttccagggaagagaagaaacaaaaaactgaaggaataaaaagtttaagccacaaagcattaataggaacacttggacctgtacaagagatatgctgaggggcatggggaaggaattccttccttctcaagctgtaggtgtcaggctttggccgtgaaaatgacagtggattttctactcattcagcaaactttctggaaaccccatcacctgccacgtgtgtgtggaggtgctgtgtgggtatacaaaggcgaattaagatgtgatcctgggtcagggacagtggctgccacctgtaatcccagcactttggaagaccaaggtggaaggctcacttgagcccagaagtttgagaccaacctgagaaacagagtgagatccccatctttacaaaaaaaaaaaaaaaaaatactagctagctgagcatggtggcatgtgtctatagttccagcaactctggaggctgaggtgggaagatcacttgaacccagaaattcaaggctgcagcaagccatgatggtaccattgtactccagcctgttcaacagagtgagaccctatctcaaaaaaaaaaaaaaacaaaaaacagaagacatggtcctgatctctactctcagggtttcatactctattgagggaagataaagtttattataatgcaaggagaaaccactctaaatgcagcatttacaaaacgctctgagagcataggggtctgtctgagggaagtggagaaaggcagagctattgccatttaggtcggatcttggatgagttaggagttcttcaggaggggtaggaaggatagataacatgtacaaaggcaaagcaatgcaaaaatacaatggtatgatgttggctgtgactggcatcttatgttatagggctggggagagacagttaagcagaacattcagccggagttgtatccttgacactgttgggctaagaggctgggttgccttgttttagtttgaggaaggctgtggacattttaaagggagggaatgatacgggctgttctcatctgatacttgtgcttctcttctccctgttcttttgagttggactgtggccacggaagggcagaggaggagaaatcttccagcagtcatggggagacacagatatcctttatcttagttgggattaacaaaacaaattaactttgggtgtgaggagaagcgcttcagataagaaatgggcaaacttggcgggggttgctgatagtgacaccacatcttccctgtctttacttggggaccatttatttttattttccccctctctttaaaagctgttgtatctctaggaaaaaaaaaaggctccaccttcaggaatgcagtgtggttttacttctggtaggtgaagaaaatttagcttctggatttttctatgcttgataaagggtatagtgtgtaaatgtaggaaacaaaactatctctaaccagatctcaaattttatgaaagaaacacaaaatatggatatattaatgtagaatagacatgtgtaatatacattgccctttgggttgcaaggtttttttctatatttctatattttcttctgtatttctataaatatatttctatattttttctgggagaaaaataaatcttaaatattttaaacaaaagttctcagtgagtgtgatctctgtactcaaccttggaaacaaaaacagatttcttgggaggaggagggataaaattgggggtatgctgtgtattttgggaagaatttggcttctttcttgctgatacctttcactagttgccgtaagattcaggtggttctttcattattcattctacatgtattcattgagcaactattcatcaaccagctgtacctttctggacaggcttattttggactgaaaggcattcccttgcctgtcccacggcctccccctgagattttcttagctgcgctcagtgtggccacaacaccccgtgattctgtcatcacctcccttgctacgaggctgctctagagccctccataaacaagctgtccaggctgtttggataagagcaggggaaagacaataataaactcgggaggatggcatgaccaaggtgattcgcactggaggtttttaatggctttttacacatgatgagcactttattgtctgcagtttaaaacgccgtcctcacacggtggctctgtgaatgccagcctctcccggggagccttccctagcagtgcagcctcaaattcagggaaggttctggttgtttcttctgtgaacaaatatcagaagttcctatgcctgtgtcaggagctctaggttaggtgtataaaagagatggctaagtttgggaagccgcattagtgtttttgtttttgtttttaaagttttaagattaaaaaaaataaattgttagacttcactagctcttgctttctccttttcagcactggctgaataaccagaacctgagctgaacttgagtattcagaaggtgaagcaaagaggaaaatgttttattagaaacaggctttctagctgtgacaaattatatgtgaaatttcaagtacagacccgcagggttgtgatgacttcaagaatgatcaagtgtggcccagtctaggaaagtggagggacaggaaccctgcgtgcctggtttattgtgtggtttcacttcctagggagaggaaggcaggaggagagagaaagtagcatgctgcagggtgctgctgagttcaggctgtggctgtccccagtatttcagctcatgccggtaatcagcaggcctccaggaggaagagttgggagctgttatgcaaagctgagaacctgtaagtcgaggtaggaagaagacagttcaaatcccttcggatgactcttgggcagtctaaagtctgatcccaatttatctttccagattgttctattaacctggccaaacaccaaatcttttgtgtacacatgaccgttggaaccctcttctctgcttggcaaactctaaaccctccttcaagaaccagttcagaagtgatcagtgtaatcagccattttaaaaaattggtttaaatctgtacccctccacccccatttctgcttcatctctccccaaggcagaatcagtctctcttctctgttgcttccatgcaccttggctgatggacactgttagaattgatgctcacagcttgggagagcagatggggtctgggagagcctcctgagttcactggcacaggatcatacaagacaatatgtgtgaaagtcagtggttaattgcaaagcactgtaccactgtgttcatagctaccctttattgaatacatcgtgcttggtattttctcatcaaatcctcacaacaaccatttgaaggtaggtattatagtcatctttcttttaaacatacaaaaactgagtctctaagaggttaagaagtgggctgcccatggtcacattaaatagtaagtggcaaagttacattaaacccagttctgactccaccatctcaacccatgtcaccatttttctgggcctgtgggcaatgcagacgtgagggagacctggtctttgctgttaaagcttctaatctgggatggagataaggcagtcactgccccctggtgtatagtctaaggtgggatacaggctctaagaagggtgcacataaaaagtgtttggagagcaataaagaggctttgtggagagagctttccttccctgcaccttgaggagtgggcagggtttttatagcagacttagagaatagggaatggcagaaactacatgaataaatgcttagtggagtataagaagagtgcaatggagagaagggtatgagactaaggctatcttaatcatatgactattaccaaggacttagagcccacaacatctcccaccctctgccccctatccttggtcttttatgatgggagatggttgctagcctgcatttagggatagctatgcttatacagaacttctcacacagagtagtactgcttccctgggtttggaagcatttttgattttgccagaaagattggcagggggtggggtggggtggatgcatgtgaagccgggggggtgtgctacaattggcacttggtgctccctgaaccaaatatactaaatatcttgtaatggatgcatcagtcctacccagggaataattctcccactccggagacccagtatctcctgtgtgggatcccccatctacaagtatacatgtaaactttcccctgggccactgcagtgtccctctgggaaacatgaatctgttcctggcacctctctagacactctagaatggttcagttgttttatccctatacatacttgacctccagaacatgctatttatgctactcccaaagcttatagctgaaaacaaacatttctaccctatttttcttcccttgaaatatcctctggctctgaggtcatttaaggaataggcagcccttgcagatttttgtaagtttcctcttcgcatgaacaataactgcaaaatgatccatctgatctggctaccattgttgaaggcaagaggatacaaagagcattcatcgggccaggcgccttctcaagaagggctcatcaaggtggaaaaccaagtggcacatacttgtggagaaagtttgaaaggagtaggggttaagggagtggtagggattgaggaaaagcctaataacatggtaataggagataacagactacaaaacccctgtgaaaccaggaataaaagagccccatgcttcacaaatacaagattgaatgagtttcatgtttaatgtaaatacacctgccatttgttctctgaagcactggttacaggttttgagataaaatagagttttgaacattgtgccagtgtaatttgcctttgcccaggcatagactgtacactttgttcctgaacagtccttagagacaacatagtgctctgatcagctcaaaggtcccacctcctgatgtgagacctctgcttccacctggcctgcatctgagactccttggctattgacagagtagggggaagtgagacagtggcccagggtgccagtgatctcatggctaaagtggatcattttactctcctgcattgaagttactcactgcattaagggtaaagagcaaaaccctcaatttctcctataaagccctggcctaccttttgctcaagtctcaccattctctctgcagttgctcaggcctactttcagttcctagactgttactgtgcagggtccagcctcagggcctttgctgtcctctgcgtgtgagcccttctgctcccttccccttcagctttcaattcttctttccttaagtcaacattacatattatttctttacggacactgtccctgaacccaacctcacagcagaagacatcaggtgacctcttacattggtcactgggcaccatactttccctgtggctcctgtcccagtttataattatacatttgtgtgattacctgatgaatgtctcctcttccactggactgtgaattccatgagggtaattctggcactcagtctaagcctgacacctggcaggtactcaaagggtatttgtttaagaaattaattattaaatgtatcacagatacatcagaagatgcaaataagcaaacaggaagaaaaaaagcaatcacagttctacaaccaaagaaaagccactttccattttttggcatatactttaaaattttttttctattctataaaataatatgattttcccttaatagtatggtaaacaggattaagcatccactaaatttaatttgccatcattttattcaaccaatcccctattgctagactcaaatcagatttgtatgatctattgtttcatggaaaccgatgcaaaattataaaaaattaaatcatttttgcttctcaatcagcattttactttatccaaaaggagtatatgatgagaaatcaagagtgactgtccaggaaaatggagatgtggcagatggagctgcagaccacgtggggagagccctggccacaggaaatgactgtggttggtagaggggaaagtattggacagttaaggagttgccacctgcccctggtggaggcaaatgttgttttgtggaaagcacgtggcataatgacagggcctctgcaggctcagtgatgtgggtgagcaaaatggctgtcttgggattatctaggagcttctgaaggcagtagggtggtggctaatttcttaatgctgctctcccatcctagtgatgggcagagaggatgagaaagccagctctggggagacaactgttgttccaaagtgaggagtcaccactacctgccatctcgcagactcttgtctagtgcccccttgaggccatgcttgttgttagccctgactcgggtgccccggcacctgccgtaaaccaagctagacccagattgcgtttgggtgcctggaacaggagaagttttaggaatttatgttagagattcaccatgttgtactttctgccaaagcgtccctccctgagtcagaatagtggaaggctgactatattccacccagcacgacgcactgaatgcttggtatgagcagcacatcatacgacaggaatctcacaacaaagcaatgaagtagttaccactatgatctccaccttatagatgaagtacctgagacttggaaagtgtcaaaaccagaatttgaacgcaggtctgtctgagcccagaccctttgctttttaaaccactctttatgaagaatctcagtaggttcttaagaacggggcgtggtactctctagagcgtttgtgacccaacactatgaattgaaacaaggcaagctctgtgctcccatttggggaaagttaatatttcacatgctctcgagaatttaggagcttggtaaaaacttactattaaacagggcttttctttaattccttttgtttaaaaattttcttgtgaaacactctatatactgtgcctccctctgagacgtcagtggtgccagagaccgttagggagtttgtgtaaatagagagagggccaaatgctgcccacacaagtagtgaggcatgaggctgagtgcgtggaacagttccatagctagccctaggctctgaagagtgtcctgagacctcatctgggtcccaaaatcggtgggcagtgctgtctccgcgagacaatgaccagcatgaggaaatacctttaaccattcatctttttaaaaagataagtttgctaagcaaataaaaccagttagccttgaaagttcagtattaatgaatgttaatgcatatcttgagattttctaaaaaactgacaaatcttccaaaagacaggaatatctagagggtaaataacaggactaaaatgctttgaaacatctttgaaatgatggttcaatgcacagggtcaaagggtaggactggttctcttcaagcattttaaaaaaatgcctcatttttatttaacattgttttgggaaggagtgcattatattgacacattgagaaaaaaattcctttttgtttttctaaaactaataggagcttaggcattatgattaaggaccaaaaagagccaatgccgatgaatgccctctttcttcagctgtaaaatttaatggccgctaccgagaggtttttcttttaatcagcaaaaaatttattttgtccttgacattttatgccaaaaatcagcccagagaatgtgttttatagcctgggctgaattcccctaaaggtagagttttcctatgagcagtgttcattgaattggctttttttttttttttttgcactagataactatattaatttattagataatctttttattgtttcagcaagatagaggaaacttacacagagacagcagagcataatgggtaagcatctgggttcttttggaagacgagatattggtttccattggccttgctacttcctgtctttctgaccttgagtaaattactcttccagagcctgtttctttgttcaattggggatcataatagtgccgccgtcatcatgctgtcatgattaatgcacctaaagcatttagcacagctgtcagcacttattgagtattgactaattattagcgatgcacagtgatctataacttaaagcttcgtctcagaatatgccttcttatgatctgatagtaataggaatcagcagaaaataaggtggttcaactatccgggaaaactaccaaatatccgcttagcagaggcaaaataaatgtagcttaaatgcagctgaaaatgctgaaagctgcttttgtttctcatgttatagaaatgcagttatttttattaaaagtgatgggaaatccatctgtaatctcctgtctttcttttatctgtttgtaaaaatagctcagtaaacccataaatgccaagaccctgttcagtgtgagaaacattgttgggcaggatgggaaagttcaaagaaatatcagatgcaatccctgctttggtggaatatttggtgtaacttggaaaattaaatggaaaaaaaattaaacaacaaaacagcacccagctgccaaataagtgaggaaggaaagacctcaggctgaagcactggtgatgggaggagggatttatttgagctggtttttcaaaggatgggtaaggaaagaatagcaggaaggcgtctcataggtatggtttaatggtaagagcaaagtcagtgtagtggcaaagaacaaggcaagagggtggagtggttagcaagtgaaggctcattaatgcttaaggctacctttgaaacagaagtgtctgtctgaccggattcaggaggcctgtccatcacgccattctccaccaccatgattcattactccagagtctcttatcttcaaatcaaaagcaagacgagaggcagatacagatatgaggaagtgctttgcttttcgctactctgccaaacatagtttacataccaacactgataatctgtcagcccacctctcctggacacttaatcatttccctggaatccactggaataatttttttatgcattacaaagtatgcttcagagtgtctatttcttaagataagtttgcattcctttaaccaagtggcattcccacaaagccccaaggtggcccgtgttacacattccttcttacagccaaagtggtcagttaggaaggcagctaccttcatggcctgttagtaagaatgttggacacttgttgggcatttactctgtgggagacactgttctcagtgctttacatgtccaaattcatttaactctccagaagagggagcagtaggagagaagggtgatgaacagaccctacaaacggactaaattattaaataatgaatcagcaattagttctaaaaatgtttatgtagtgcttactgtgtgccagacaccatgattaaaggacaatcgaagtaactcggtaatcacctctgaactgccagtatgggtgttttatcaccttccatgttctgtgttgacggtttattgaacacattttgagttcttcagggcagtgcttattaaattcagcgtgcgtttggatcgcctgggaatcatggtaaaatgcagattccgatttgaaagtgctgtggtggagcctgcgagtttgcatttctaacaagctcatgggggtggcgacgctgcacatccaggtgacctcttgaagtagcaagatcttagagaaccaagtaaatggcagaggaaatacaagcaggataagacaggaacatattgtcactttcacaccagaagaggcagtaggcctggatttggccccaggccccagtttaacatgatcattatggttgttgtcgctaccatgtgcaccaaaggaatctaagagcttggaaccttaaggcccaatggcacggtttacaatgctaacacaccttaaagttaaaggaagaatgtacgctatcctaggaacatgactgataaggtgcggcagagagagtggggtggggcgggtggggtgggaggctagaagtcaggaaacctgtgttctcatcagggctcatttacagacttgctatgtgacctagtttaatcactgagcctttcagtgtcccgatatcctcatctacaaagcagactggtaaacatctgctctgcccacccaggactgcagaagtgagacaggatgcacaaaagctcttgggaaaaccaaagaaacactgcaaatgtgcatttttataattaaaaaatatagagtctgtcttcagcagtaggcaggaaagagggggtatctcaggagctcccactttggtttatgtctctctgagggcttgttatgcttctcagcctattctgtattcaggagatgcatagagcttctggcttcatgctgtttcagagcagcccacttcagccttttctttaccaatagaaacccctagactatcacagcttgtccttcttgcactgaacccattaagaataaagaaagtctctgggctggggagtggaagtgagggacataacatttactgagtattttatgtgagttattttacttaatcttcacaacactcctaggaggaaggtagtctgaattatgaaattgttccaatttcatagatgaggcacctaaagctcagacaggctcacttgcctggggtttggttttgtttctctttgtaaaaggtaagtcttttcaatttagtaggtcaaaacacgtgattctctccttttcataagactataaagttagcaacctctggtatctggttaacagttcactttgtgcaggttattccagaggtagatagcatgagtttatgtcgaagcccaggattttgtgccaaacatccgtctctttgcaacagaattggagaattgttccagaattctttgaattcttaatttgcagaatttcataaagagttctacagctcacttttcctaggaatagaggagagcggcaactgaagacagcaggctttttctttttagtattgatgatgatgatgatgagctttaacacagcttatccaggtaatcctcatgtagtgctgtgatgttgatggttttgttacccatattttagagaagaggaaactagagacttagagggttaagagacttatacacagcctaactattccaagtgtttaggactaagtggactttagtcttggtttttccagctccaactctgagggttgtttccatattcccctgtattacatggattaaccagtgttagtgaccatccggctaagaaattagcagtggctctcagtggaaaagagctacttgattctaatgatagtaataatgaaaacaactgccagcttcctgtgctgttggtagggcctcctgggttggccctgtcacatcccatcatgtcacggggcatgtgagatcacggggctgaaataaccctgggcgactgatgtaaaacagattgcgtgtgacacctgcccttgggcttcccagcgtggcacttcagcccctcttggctcagaaagcatttaatatacccacagagtgctgggttcccccccaaaactttctgcaaacttccttgtaactctggaacaggatcccaggccatgtggaatcttgaaaaggtgattgacactggagacgcaaggtcctgttggtttgggctggttactcaatgtctttgagtctcagtttttcacctgcaagtgggaataaggatagtactccgttctctgagttgtgagggttaattgagccagtggtgccagatcacagtaggtacccaggcaaagaggattgttgtagcttactttcttctggattacatcatccttaatttttctctttccctctcctctcagaagtcatcacaaattctgacacttctaaattatgccttaagcctatctatattgtgtctagctaccaccttagtctaaatcagcttcacctctagcctagattactatactagcttcttacctggtcttctgcttgtactcccacttgacagagcatctagagtgattttattaaaatataaaccagatcattcattcgcttttgtaaaactcttcagcggtttccaattgcactttgaatcaatctgtaccccttaccctgcaaactgccacctgctgtggtccctgcccacttacccacctccactggatgcccctcgatacccagctcactgtgcctcggtcatgacggccttctttttcttccttggatgcaccaaaaccagggggcctgaggacctttgcatgtgctgtttgtcccctttgcctggaatgctattctccaagatctttgcatagctggaaattttgtagctctaaacacggggttcttccatttcataagactataaagctagcaacctctggtatctggttaacagttcactttgtgcaggttattccagatgcagatagcatgggtttaggttttcatttagagaaccacctgacctctccgtagaaactcaccacattctctcccccagtgactttctaacacattacagtgttttaattttcttcatgtactcagcactacttgaagttttctcatgtatttgttgacagtttatctccacccactagaaggtaactctggccagggttacagcactagttctaaccagtgtctgctgtataagaggcactcagcaaatattgattgattgaatgaatacattttttattatatattaaaaataagtagaaatgaatttttaaaaataagagggaagtctttcaatgtctatattcaagccgaggtttgggatccagtggccatggacaggcctgatgggaaggggtgggtggaagaatcactcgtcttcagagcattgcggtatggtgagagaccatctcatacagcctactgcctcccgatactttcattcactcgttcagttatttgaaaagagctcactgtgtgctgctctatgtgctgaactctgggctcatagcaactaaccatgaaagacctggctctgcctttaccgagcttaaagtttgacagtgaagactggcactgagtgcaagaattttccattgaaacaagtatttaacaagagagcagcacaggagggcctgggagcattttgtaggaggccctcttctggaggatcagggagtcatctctaaaggagtgacatctaatctaaatctggagaatgcctgaccctgtccacattttctcatcagcccttgagaacggtggaaggttttgcggattggaccagcaaaggggatgcttttttttttttttttttttttttaagaaaaaacttcctccacccagatgacacctttttctttctttattttttattttttatttttttattattatactttaagttttagggtacatgtgcacattgtgcaggttagttacatatgtatacatgtgccatgctggtgcgctgcacccactaactcatcatctagcattaggtatatctcccaatgctatccctcccccttccccccaccccacaacagtccccagagtgtgatattccccttcctgtgtccatgtgatctcattgttcaattctcacctatgagtgagaatatgcggtgtctggttttttgttcttgcgatagtttactgagaatgatgatttccaatttcatccatgtccctacaaaggacatgaactcatcattttttatggctgcatagtattccatggtgtatatgtgccacattttcttaatccagtctatcattgttggacatttgggttggttccaagtttttgctatcgtgaataatgccgcaataaacatacgtgtgcatgtgtctttatagcagcatgatttatagtcctttgggtatatacccagtaatgggatggctgggccaaatggtatttccagttctagatccctgaggaatcgccacactgacttccacaatggttgaactagtttacagtcccaccaacagtgtaaaagttttcctatttctccacatcctctccagcacctgttgtttcctgactttttaatgattgccattctaactggtgtgagatggtatctcattgtggttttgatttgcatttctctgatggccagtgatgatgagcattttttcatgtgttttttggctgcataaatgtcttcttttgagaagtgtctgttcatgtccatcgcccactttttgatggggttgtttgtttttttcttgtaaatttgtttgagttcattgtagattctggatattagccctttgtcagatgagtaggttgcgaaaattttctcccattctgtaggttgcctgttcactctgatggcagtttcttttgctgtgcagaagctctttagtttaattagatcccatttgtcaattttgtcttttgttgccattgcttttggtgttttagacatgaagtccttgtccatgcctaagtcctgaatggtaatgcctaggttttcttctagggtttttatggttttaggtctaacgtttaagtctttaatccatcttgaattgatttttgtataaggtgtaaggaagggatccagtttcagctttctacatatggctagccagttttcccagcaccatttattaaatagggaatcctttccccattgcttgtttttctcaggtttgtcaaagatcagatagttgtagatatgtggcgttatttctgagggctctgttctgttccattgatctatatctctgttttggtaccagtaccatgctgttactgtagccttgtagtatagtttgaagtcaggtagtgtgatgcctccagctttgttctttcagcttaggattgacttggcgatgcgggctcttttttggttccatatgaactttaaagtagttttttccaattctgtgaagaaaggcattggtagcttgatggggatggcattgaatctgtaaattaccttgggcagtatggccattttcatgatattgattcttcctacccatgagcatggaatgttcttccatttgtttgtatcctcttttatttccttgagcagtggtttgtagttctccttgaagaggtccttcacatcccttgtaagttggattcctaggtattttattctctttgaagcaattgtgaatgggagttcagtcatgatttggctctctgtttgtctgttgttgatgtataagaatgcttgtgatttttgtacattgattttgtatcctgagactttgctgaagttgcttatcagcttaaggagattttgggctgagacaatggggttttctagatatacaatcatgtcgtctgcaaacagggacaatttgacttcctcttttcctaattgaataccctttatttccttctcctgcctgattgccctggccagaacttccaacactatgttgaataggagtggtgagagagggcatccctgtcttgtgccagttttcaaagggaatgcttccagtttttgtccattcagtatgatattggctgtggttttgtcatagatagctcttattattttgaaatacgtcccatcaatacctaatttattgagagtttttagcatgaagggttgttgaattttgtcaaaggctttttctgcatctattgagataatcatgtggtttttgtctttggctctgtttatatgctggattacatttattgatttgcgtatattgaaccagccttgcatcccagggatgaagcccacttgatcatggtggataagctttttgatgtgctgctggatttgttttgccagtattttattgaggatttttgcatcaatgttcatcaaggatattggtctaaaattctctttttttgttgtgtctctgcctggctttggtatcagaatgatgctggcctcataaaatgagttagagaggattccctctttttcttaaaaaaaaaaaaaaaatagagtagcctctctgaactagcagcagtcctggggggatgttgatatcctcattttagacgaggaacctgtggctcatggaaataaggtgaattgttcatattcacaccactagtaattggtgggttaggcccatgtatccatgactcaaagccccatcccttttcagacaactagaggtgtacccactccattgcaatcatgaggaatttaagtttcaggacattccatcttgcttcttttgtttcctcaacgactaggcctgttctggatttttaggagttaaaatttggttgatgctcttttcaatcctaacaaaatatctcactatccatagtcctttgcgatccactgacaagtgagaaaccaaaatgtaaggggttccctttttttttttttttttgccagccagcctaatgatttggcatgctggcaactgcgtggttttgaaccgtgaggctgctctgagtacctgcatccttgtcctcatggaagtcaccaaaaccgtttgtcaaatggccaattccatcttatacagggagtcggggaaatgctcatgaaattgatcttgaagcacttggcaatcgcaagctccataagaatcctgggtaggagtaattaacttattttggaggacggatttacttaggaaagctccaactgcaatgagggtgggcccttttcttgttgctcctggcatgtgctcttctccaagtaacatttgcagcagtctgggtggtttgtctgcttagagccatccagaaaagttggtgggaaaagccaagaggccattggcactcagagactggggttggcaccagtcacagtgagaagcattacttttattagcaacttagtcattttacagcaggcgtggcagaagtgcctcctatgcagacgcaagacgctaatatggttattagggtaagaggagcagatatgcccagtatcccacaaaattctcaaattataaacatagcacacctttcactaatgtggtgataagacttagcttatataggcttgcatcctgaaaaacctgctctcagtctctcctaggtcatggctgtggtgtttgaatcctaattctgccattactagctgtgggactttgtcatcacaagactagcttccctgttctcatctgtaaaataaggatgttaatggcatctacctactagaattgtttcaaggaataaatgggttaatacaaataaagctcttagaacagtgcctggcacttagtgctcagtgagtccttgggataaccctctagagaggccaagatctgggctgtgctgcggactgctctttaccttatcctaacaatgaaaggacacagtgtgccctctgtcaggccctgttacaggccgaagctcataaaagtcagagggagaggtttggaaatttaacccagctggggcatcccagatgaaaaggattagtatttaaagagccgttacagtttatactagcaaacacacaaataggcagattgacacttcctgcctcagggatatggggcttccaccctttccagactccacaatccgctttgctgtgtgttttctctttcttcccttttcttgtttaatataatgtttgcttcctttgcccatcagtaagcactgaatattggacatctatcctgtagaggactgggattgctggtgtgataagtcatgattcctgaccttggggaattttgcaatgttacaagcaagctgggaaatagacacgtatgtgtgagcatgtttaccctggccaaatcccatttattctttaaatcccatctcaaatatcacctcccctaggaagctttcccagagttctcctagcagagtttcagttctctctctctctctctcggttgctttcataaaactttgccttttaccttattggagatgtgattgtctgcttctctgactcacatattagattaggagccccttgagggcagagaccatggaaaagcagcctagagggatgttatatagttcttatttatctccatagcttctagtacttggggatgcagtgtatgcttattggtcaaaatggtaaataaatgtaaatggtaaataataatagctaacactgagtacctcttgaaaagcagttcttattccttctctgctgtaatgataactaacatttactaaaggctttcttttgttcagtatgctttttccttcagtagctcatgtgatcatcctgccttaggaggaagtataattaacagattataaatgaagagactagaggcacaaggaggttttgggtaactcatgctagaattcagatccagcaatctggcccagaacctggtctcttaacaactagattaatctgcctctcactgtgagtctgtagacagagtgttaggacttttttttattattattattatttaagttctgggatacatgtgcagaacgtgcaggtttgttacataagtatacacatgccatggttgtttgctgcacccatgaacccgtcatctacattagatatttctcctaatgctatccctcctctagccccccacccgctgacaggccccagtgtgtgatgttcccttccctgagtccatgtgttttcattgtttaatgggttctcctctctcttactttaaaggcagggattccggcttattggactctgctgtgaactgactaaagtcattatctgttcaacagtggtcaggttctttctggtgggtttgggaaccacatttcctccccagcaacccaagttacaatgaaagcaagtcataggctaaattattcacaagtacaagcatttattagccagcaagcataaaaatcatcgtaaatctcttttctttaggctccaagtaattccttctttctgtccttgagccccatgaaccatccttgcataaaaaattcaggataagacaagcataatattctgatatcagggttggccagtcttccagctgcatcaggtggtagacttactgggtgggacacacaagaccttacagaagtttggacctaggtacgactcctcttgttcatgctagagtggagatgcccatatgatgttgtaagccaatcatatttcctgaccatcgctcattttatgaatgaaaaattatttctaatgccccatattaactgatcctcattaatgactcctcaaatgcagatttagatagcaatatgtgaagtggttacagtttcctcctttatattcttaccaacttctattcacatgtgtgaattcctaattagtgtacttgaaatgttaataactatggcagggatgtaggtccctatttaggctacacaaatgttaactatccatcctcagagttagattaaatttaacttagaaacacacatgttcatctcaatatcagtactcaagagctttaaagtaaatcacagaaggccggatgcagtggctcagcttacgcctgtgatcccaacacctggggaggccaagaaaggcggatcagttgaggtcaggagtttgagaccagtctggtcagcatagcaaaaccccatctccactaaaaagacaaaaattagctgggcatggtggtgggtgcctgtaatcccagctactctggaggctgaggcacgagaatcacttgaacctgggaggcggaggttgcagtgagccgagatggcgctaccatactccaacctgggtgacagagtgagactctgtctcaaaacataaagtaaaataaagtaaatcacagacaatataagcagaagtgcttagaggttgtgtagaacagtggaaagaggtgtacgtagctctgaggtcagacaaaatgggttcgaatcccagcttctctgtggcagtgggccagtgaccacatctcagaacctcgagtacagtagtcttcctttatccaaggttttgctttccagggtttcagttaccctcagtcaactgtggtccaaaaatattaaatggaagattccagaaataaacaacttctaggtttaaaattacatgctgtcccaagtagtatggtgaaatctcacgccttcctgcttagttctgcctgggacctgcatccttcctttgtcctgcgtatctaagctgtctacaatttctagagcctattagtcacttcatagccatctgggttatcagatagatcctcacagtgtatactcatcttggtatcacagtgcttgtgtttgagtaactcttattttatttaataatggcctcaaagtgcaagagtagtgatgctggcatattactatgttctgttttattattagttattattgttaatctcttactgttcctaatttataaatgatactttatcacaggtatgtgtgtataggggaaaattgtatatatagggttctgtactatacatgatttcaggcatccactggggtctaggaacgtaccccctttggatgaggggaaactgctatactcatattatgtactcataataatgcctaccttacatgcttgcagtgaggattaaattagataatatttataaagtacctagctcaggggctggcactgagccatcgaatacataaagccagtattattaacctcagttactggcctgtagcaagatgctcaatagacctgaggagaatgagtgaaggggaggttgcctggcatgggaggaagaggtggaaaaggtgcaggggtgatagataggattcttggctggcctatgggggccccagctgagtgggaatggagaggaagtgggttgatggagtcccattgtgtgcagaaagaggggacctctgcttgggtggaaaatgaggaaaaaaggcagcactcaggtctcggcaagaatagcccggcctcccttccttcagcccatcttctgaactagaaaaaggctgttgggtgctgtatgagaagtgaggcctaccaatgagagtcatcatcatgtaaattctctaccatcctggcttggtcggtagcatttctactgcccccaaagccaaggaagaatgatgcccctgatggttcttcccatttagaaggaactgcagtttacacacattaccttacctgattctcagatgtcctcaagtgatgttatcatgatctatcattattttccctgctttatagaagggaaaacagtcccagaggaggtaggtgactcctttagccagtaagtgacagaggcaggatttgaacctgcatccagctgatcctgttgctcttgctgtagaggagaggcagtgtatgggtattctcccagcttgcttggtattcattccactgatttttacctggagcttgaagactggaactgggtggtagaatggcaggtgtagggccagagctggtagagtgggtggtgacagttctgagccttctttgcccacctgtctgacagccctttatctctgtaataattgccaagagtcctgaaagatgcctcttcccttcccagttgcaaggcctgagattgagcccagggatcttgccagccttaattgacttgtgttgaaaattataagaactgaccctctttttaattttccctaaattaaacactgtggagggatcaaatggaaaatgaccaagagtcctgagaaaggattatccatctggcatctgatggaacttgagagacagggcagcatagtagtggtgcctgctgcatcttatagctgtgggaccttggccaagcttctggacctttcacagtgcgtttcatttccttatatgtaaaacagggttaataattctggcctcagatggttgtgacagtcattgagattctccatgttacttgcatggtactaggcaggagcttaatcagtgtccctttacatccccagaagtgggcttaaatagcccagtaggagtatgaaaccctcaatcaaatgtctggcatataataggtgctcaataagtatttgctgaatgaataagcatggttgctttgctctctttcgtaagttttctaactccatcgcagaagggttaagagaccattaagatcttgccatttcttgggcagagatactaacatttattgaacaccaactgctttgtacgttttatctaattgcaacaattctgaaaatctttactatgcctgtaatttaaatgaagaaattagggccttgagaggttcaatgagaaaaccaaggtcacccagctaattggtgaagttgggatctgtaggcagagctgtgactataaagcctgtgttcccaccagcaaatgtcatgcagtgttgaacatacacatcccaggtgagacatgccctctgcctggactgaacatacaagacccagagcaagttccgcaccttcgtgtctggatgtggggtcagtacagcttctgcacaatgagccacagtgaataaggaagtacagagaagcagggtgagggctgatgggagcaccaaggcttgggagctgggctctgtctcagatttggcctccagctagctgctgctttgcaggtgcaggattcagtttgggttgttggtggtggtgaggaggtatgtcagggagagcaataaagcagtgataaacatccctcatggtaaatcccctatggtgaacataagggatttgatgataagaacgaggtcaagatcctgtaggtgaactccactggtatggacctgggtggccggtatggagcaagaggccttgagcttcccagtaagggcctggctctgagctagacccccctggtttgaaccgagccataccagtcaccctctgtgtgactttggacaagagacttacactcattaaggctcagtttgctcatctgttagatgggcatgatgctggtgacaccaacctcatggacttgctgtgtggatcaaaatggtatcagacccatacaatcttcagcatagtacctggctcctgtagtaagcatataacaaatattaggtgctatcattgacacaaaggccacattttaccctcaacttcatttatttcctaaatggatcctgtgggatggttttgacagataaaactgtttaccaaattcttaccccgtgacttggacttgcaaggactgcaaggcggaatctaatttaacacttatttaaatttaacagaaagaaaacatttgggttggctttgtcagggtttcctttttttaaaaaagtatattttacaattttggcttttgagatatcagggtcttgagggacagacagcttacgtctaatgtctgggcctgagaagatcctgtaagagacaggtctgtggggtcaaattggcctttcagactgagcctgccatagattttctgaggatttagatgatgtgaaggggagttaacccatcccacattgtaaattattttttcaaaggaaggatgagggagccaagtaacaatttatcatgcttcttttacattttgactctgcaagaatttagcaatctgccatccatctccagctctgtttgatttgggagaattttttttttttttttttgggtagaggggagaatgattgtaaaccaaatgttgaaaagtagcctgttggttttttgttgcagtgtaaaatatggttcagtaattcattgcccaacctccctcccctgccaacaccaccaccaaagaaacaaaaactaatgtccctgctcctggacagcaagagttaattttcagcctttggttaggaaaacagaatggagggagctgtatgaactttatgcttatagcttagttctgcaagcccaggagatcattggtcagcatcagatgagctaagatgcagttctgcaactgctgaggaccaggtcctgtttaccagcagagggcacagcctgtgccaaggtacagctaatgggaagtcagagacagagtgaaatggtcaggttaattgtagagggtggcacagatcaggcctaggtgtgctgaactaagtaaaatcaaatttctctaacggaaaccccaaaaagttattaaaacacaacctccctctaatcatttaccacatggtttttaaattctgtgggtagtttaccaagaaggcctcttaggattatatataatgtccacatacttgattactgagaaaggaaaccaagactatatttaatcacaaactgtacagtgtcagaaaaagtcctgctaccctgtcttgtcactgccctgagtggcagtaatttatagcttgaaacagcagctggagcaggaaggagcctttaaagcagtcacatttgttggttaactttggttaacccagaggtcaaaagcagtttctgtctagcacattagataacttttgaaacgtttgacatattgcaggtagcattacaggaacatccacacttgtgataaaaggagttatttatgaggtagctgtggtttcaaatgtaaaggagaaaaaaaagtccttcaaattatgaaagctttggtaaaaatcccaagttggatgttgctggcatttctgagagggtgaaagggagattaaccaggaataaaatgggaaagtccatttaagtacacactggcatcccagtggcattacctgctgattgaaagaccgttatggagaaaggattaatgccttcagccttaccattagttgtcttttatgtcatgagttgctatgaagaactctactattggtgctttccagctgacctcttattgtccagaaataagtgaagaagatctattggttccaaacacattatcacggagcacttgcaatctattcgttttctgccttggtttatcaaagctaagcaaggggtgctctaaagtgaaaaggtggagaccttagattcagctgctttctgaagtctctcctcttctcccacagaacagtcattgtggtatttcataaaaaatgcatgctttggggggaataatgactgttttctaaaacacccttaccttaaatgcttgaaggttttgctggaatgctaaccttccagcatttaaggaatatatgactaagttaagaattattttttaacgcatgttatgggaaagttgaagttaattggagagaaagaaatttaacttgacaccattatatttcttcttccttctttccttccttgtctacattcaagtcacacaccacacaatgtagtgatctgggaactggccttggaataacacatcctgccgatgccatttttagctagagatctggggcaggtgatgttacccttctgagcactttccttagctccttgtaaagttgctatcaggaacaaatgaagttctatgtataagagtcctctgaacatttgcaaagtactgagcaaatgtacagtggtgaatataaattccctgagggcaggggccgtctctgatttaggcctcttcatattgccattaccaaacacagggccatttgttgactcaatgaggcaatcagccagtagacaactttatctcatcaatagcccagtttttattatgtgtccagtgtgtttcctgtctggagctttgatagtttttagagctagaagccaatgatatggttgagaaacatatcaattaggagatgtctgataattggccaaggaattgggccaagatgttattaattttcggcttccttcacttgactataagctcctccaggccaggggtcatgtctcattcatctttctatctcttagtgactgaggtttagcacaatgctttgcacttctcagtgagccggcagtgcttctggatggaatgttcagtggccctgggccgtccttttactgccatcccagacccattgccactccctgttctgaattgagatctgaacttcagcaggtttgtggacttgctcttcttccactctaggaatgccctttcaggtaccaacactgcaagatggacccttctacattctgcagtgagttcattgcataatctctattgcccactttagagcgcagacatccttctaacttctgcagatgtcattgaagttgtttttttttttaattatatggctgaatcatttatacatgtgtggtgaccacatctcatcttctagtgcaagctgctctggatagccatcttgggcatggctggctcagagaagtgagtggtcctaacgttgaatagagaaaggaaggagccacattggcagtacagttgtaaatcagagcctgaaggtgcaggtggttttgggaaatgagagttttctgaacctagaggcaagaagaaatatgtcatagaggaagttaatatttcattagtgtgtttttagtgttcatgtgacatggattgcaaaggaggaaactactgagtctgtagatgttgattagttacttgttccagtgttaatatatttcctgttgctgtagagcccgtgtagacaggcatttagacttgatcacacattcagaaggttcacagttggtctactacagtgctcttctgcctaaacaccaccagattctccctagccctccttccaaatcctggctccctcttctgtttccagtctcagctgagattttacatcctcagggaagccttctttgatatcccccagagaatatagagttggcctcccatatccgtgggttctggatccatggattcaaccaaagtcaaatggaaaatatcagaaaaaaaatgtgtctgtgctttatatgagcagaattttttcttctcattattccctagacaatagagtatagaatctatttacacagcacttacattttattaggtattataagtaatctggagatgatttaaagtatacaggaggatatgcataggttatatgcaaatactaagccattttatatcacggtcttgagcatccatagattttggtatctgaggggatcctggaactaatctcccatgatactgaaggatgactgtatctggcttggtgctccagagccccctgcacctccccttagtgactttccccacactgagcaccatttatggccattacctttttactcaaggtcccttgaggcctgagtgtgcccacttgctccccactgtattcccagtgccttgcagggggagttgcttcacaaatactgatcggattgctgttcaatgaaatctccgtgaagcccatgatattaatcacatctttcactaaggtaggtttcaaatttttgtttgtccttgtaatttttttgttttaatttttaaaatttggaatttagcctgggtgcagtggcttgtgcccataaacctagcactttgggaggccaaggcagaaggatcacttcagcctgggaggtcaacaccaccctgaacaacatagggagaccctgtctctacaacaaaacaaaataaaacaaataggtgtggtggcacatgcctgtagtcccagctacttgggaggctgaggtgagaggattgctggggcccaggaggtggaggctgaagtgagcagtgattgtgccaccgcactgcagcttgggtgacggagggagaccctgtctcaataaataaatgaataaaaataaaaattggaattttactaaggagcaaatttctgctttaaattcatttcatataataccctgggtcattgtctgaaggaagaaggatcaggttgatttccagaatgcccaaatcactccttaagtttctgaaccaattgagaagcagttgtctttcccagattcttttcattgtggctggcagtggtttccaacctttgctgcacattagaattgtgtaggcatcttttaaaaatccccatgcccaggtcagctttaagccaatgaaatcagatatttggggacgagagcatattttgagggtcctaggtgatcctaatgtgcagcaaagttaaggaatacaggagtatggactattttttcgagagggtggtatgccaggtatatagcccctaagaagtaaaaattttgcttattttcctgaaatctagagaaacaaaacttaaataaatacttttggagaacacattctacattctattttaatgaaaaaatttccaggcatatcaaaaacaatgttattcacaaaaaacaatgtaagttaaacgaaatacaaatgggcttctacagtatatttcaaagtatgtgctttggatttggattctgattttacagttcgccagctgtgttacctcgaatagggaacattatacctctctgaaacatgcaaaattagggatgaaaacacctaccatggaggggtgttacaaagattagaaagaatgtccttggaggatctagtacttaatgttggctccatttctccttctctttcctgcacgttttgagttaatgcattcagctttctttcctaaacctgtcaccacagacaagcctgctacaaggatccctgaagtttagagagattgacttccccaagtactttctcagttaccaaggataattcattcaacgggtttctacactcattttcttgtgaaggaagaaacatgagtgggaagggaggaagttaggagttggacctgagtatcctgtatacaggagtgtctgaaagtgcactgttgtgatccatccatcttttaggaagagttggatgatgattttctggctctgtagtgactcatgagccacacagggaaggcaggtttttattcattcagtcatttgagcaacagctacatgccagaccgagaagtgttaagagtgtcagaccactctaaagaaccaggggtcctcaagtaaaaaggctaattccatggtttgggcagggaaggtacaaattaagcctggagcactttgttgtaccagaaagtatacaaacatgatcagtgatgtcaagaagacagagagaaaccagcttgaaggtcttctgctggccaaatctgggacactttgagtgatggaatagataaggacagcaatggattataaggcattgaataaaatatgaagccacaagtctattcggtgacaggtaggtaagtacgtagatagatagatagacagatagatagacagacagatagatagatagatagatagatagatagatagatagatagataatgtgaaggaaaggaaagggctcttccttaacagtgtaatgccaactgacatatgtgacatgtgatatatgtggaggaagtagtgaatttgtaaagtcatcattttgcaaccctagaattgttgggcaaaaatcatcaatggatgttaaatctagagagagaggggttgataaggaacaggatatttgtatgggtttaaagtatctccccacatattgcttattggctaagactgggcaaatggtaactatacagtggaaaaaatggacaacatctcagccagatgatcaggttaatatcatgaatgagaagcagatggacatcacaaggcatccaggtgtccagatgcaggtacgtgatgcactgggaagggcacagcatcatttgtgtagtattctgaccaacactgcgtaacccgaatttaatcaggaggaaatatcaagcaaactgagtgaagaacattccacataataactgtcctgtatttgtcataggccaatgtcatgaaaagcaaaggctgaggaactgttctaagttaaaggagactaaagagacatggtcactaaatgcaatgggtaaccctggactgggttttgtgctggagggtagaaaaaacaaatgctctgaagtacattattgaaacaattgaaaaaactgggatatggcctctggattagatatatataaatattatacacatatatttaaaaatacatactgaaatattaaggggcaaagggatatggtatatgcaacttattcatctgtagttcagaaaaaataaatacacacacagaatgatacagctgtgctgaaatgttgaaattcacaagtctgggtagataaaggatatataggagttgtctggattactctggcgttgtctggattgttctctaagtttgaaataatttcaaagtaaaaggttttttaagtattggagtacagtaaataaatggagcccggctgtctgccaccacttagctgtcttactttggacaagtcactgagcctttctaaccctcagtttccttgcctttcaagtggggataacataatatcagttctttttgcattatagggttgtgtgcatgacaggtattctaactgcaaagatgtgtagacatagctgtgacattttcatctaaacccttccatacctccagggctttgtatggatcataaggctttgttcccttctatgtattagacacttgtgtttataaaccatgaggagatgatactactactaccagtaccattaataataacatcttggctagccttaaaaagtaataatcatatctgacacttacatagtactccagcttgaatagtactcatgagcctccgggtgccagacactgttctaagtactttacatgcgttatctcatttaacccttacaaaattatctccattttacagaggaggaaaccgtggcaagaaggggaggcagagtgaagattcaaattcaggcattctactctcagtttatgctctcagccagagccctccagtgaaacctttttctcctgtgcccagcaccctgcctggcacggtctggtgcagacctgataaatgtctatagaatgaatggtgggaaagagtgtttagaaagtgtaagggctctgcaactaaaaggacctgacctagaatcttcactctttcttcagtctctacattcagcttttctgagccttggttcccatgtttgataaaaacaatcctggcagagaagaggtatttaacaaatggtcatgattcttctccttctcctttgtctttttgttcttatctttccttctgaacatttccttgtgtataatgttaatactacttttaaccaggtgtttctcctctttagtgtctattatgatttttatgtaccatttttttttcatatttgtgatgacttattttacttaagtgcctccacttagattttcttaagggcaagagccacgccattttcatctttgtgtccttattgctctgtatgatgcatggccttaggagtagggccattgctagcccgtctctcactttggtgaaatttagaaaaaggcggttccttttagaaaaagctttgcagggaggagagctgtgcagcagataccagtatgtgaagaaaagacaccctgtccttggagggttacatttctcttttaggaggcacagcttggcaacgaagctatattctacctcctactcttccccaccgctgggcattttgtgtaatctgcaaaataaatgataaagttggcttggcatggtggcttatgcctgtaattccagcagattgggaagctgaggccagaagatcatatgagcccaggagttcgagagcagcctgggcaatacagtgagactctatctctacaaaaaataataaaattagccaggcatggtggagcgtgacgattgtcccagctactcaggaggctgaagtgggaggatcacttgagcccaggaggtagagactgcagcaagctgtgattacaccaccgctgcactccagcctgagcaacagagcaaaaccctgtctttaaaaaaaaaaaaaaaaaaaaaaaagattaagtgcagcagccatgcctatgagctactcaggacatattgaatgaatgaataggtacacagatgacacctccttcctggattcctttatcttttcaaacttcagactcccattgtgccacaactcactcagcctgagagatgatcccaaggctgcttgttgaactgtgggaatggttgctcctctgtagcaatccttgagtgaagcccaagggaaggctaaacctcagcccaggcaccgacacccaaactcaaattacccttcccaggttagagcaattggtctcagcttggatacagctcagggcaagcccctgtgcttcacagccttgctctttaggaagtccgtagaggaacccagctccactggtccctcaccagtgtggtctccaagtccttcctggagagccattctccccaggcccaggaagggaaaaaagctcatctggtaactgctggcattagcagagcagataccgggtgagagctctgtctctgcaggctggaggtggagccatgtggttaactgctccccgccaccaagctggctggtcacatttgcagagagaaccttgactttgtcatttgattataggtagaggcattcctaattttcacttgtgatttattattgttcttttcccattaaaataattttcttctaagatgcaaagtactaagtatttgttatagaaaagttatgataatgcaaacaaaaagaaaagagagaaaccaataatacagctcagacataatcactgtaaataccagagtttattctttcgtctctgtcttttctgcacacaggcacacacacatacacacacatacacaacatagcatcaccttcatttactcattgcattttggagacttcattcattgcttggaaatttagagattatattgatttgtgaaagcagttgaatgatctaggaatataaagtattattagcatgttgggaatggaggtgagattataccttaaattccacagatatatgcttctagtctctcatgcctgaaataaacttgctggaatgtgagtcttttatgccaagcatttgatacacaaagaacctacttcccaggagattggctaaaccaagcacgttgtgttcatctttatgatgaaatacagatttcccattaaaaggaaaatctcttcctttcagaaggttgaaaaagatgacacttcacaaaaaaaggaagaagaaaaaaaagaatcccagctggttaaatttagggtgcggaaagagatccaatcggcagataatccctggccatgggcccacagcattttcatttgattgtgcattggatacattttcattcattttaagcccttgcctttcagtattttgttccttggagacaggcaaactagtatcaatagctctcttagcctatgtcaaatggtttgatttacttaagtggtctatttcgttattccagtaaggaggaacttgtatttgttgatgcatttctgagaatgattgtgcaaagaaatgctgaaattctaatcatttttcttctatcctctcagtggtctccttgttttaaatggaaagatgttggataaaattgtgagtgtggttcatgggatgagggtgctctggatgcagagtcaggagacctggcttctcacccagctctgacactgacatcatggatacatccttggccaaatctcctaattgccttgggccttaatttccttgtctgaaaagttgggataatcatctcttctctgcttttcccacaggggtgttataaggataaaatgacctaattcagtgtctctcaacctctcttgcatattaaaattacctggggaagtgttaaaaaaataccttttgtcaggccccacccagaccagttagaatccagggtgacctgggctttggtaattttttatatcccaggagattatattgtggaagaagggttgaaaatcatcgaacatccaggcgataatatattggaaggcctgagaatgcaaattatgggaaaaggttaaaacgacccacattagtatggtcctctgtagttttcaaacggtgtcacttggagacttgttaagggtctataaggcagtggacttaaaacttttttgactgttaaactaaaaaagatcatatctcggtatacacatgcaataacatgtaaatacactcagtcccatgtaaatacagctttcacggaacaatattttctgtgtgtgattcactctaatattttttattattttccatttcattgcagtttaaactagtccatttcatttctttcattttatgtgggtgcagagccatggaattgatttaatgatctgttgtacagtcccctgacctatagtttgaaaaacactgatgaagagatggcctatttctggggagcaggctcacccattgtttaatgttgtttccttctagtaccagaatcagtctactgttgcctggatcgactttcccactctccctcccttttatacctttacttgctacatcaaacatacccagcagggttgtcctggttctacacttatttggcccttaattgggtgacttagagccttgccttctcttctgcattctaatctctgaagtgatagatcttaaacattatactttattcctcacatgagatttgttaaacaaattcaagacatattgtcaattgaattacatatagtttactaaatagattcttagcaaaaatacaagaaggtgcagttcataggttgctctagctgcaacatggtgctagtgataattttagtccctctactttggagaactggggagcccccaggccagatcatagaggaatcatctccctcttgttctgccggatcttttcttccatgcttcctggtcctcctaggcaattgtgctatcagaagtaagtttgtttcagctacagagaattctcagcttctctcctgcactcattaaagtttggctgtcatagcccagacacatcctctgtgacatttctttatccctggcttggtactgcttctgttggctggtgtgtggctctgggcaggtgcttgaggctcatagttctctctcaggacacacacactataatattcaacctaatcaaatagctattggttcctcctctctgctttactgccaaggggactagaaggtttgggtataaatttgggcaggaagagaacatcttccagatataactatctctgaaaacctcccccagcgtttttccccaatgtctgtttaaccagttttgtgtctgcttaatttatgctatattgcctctaactttgtttgacagtggcacagaatcgaatgtattcaagttaaaaaaatgtttttgtggtgtacaacatatgttttgatatataggtacagtgtggaatggctaaatcaattttcaacatatactaattgagcatatacctcaacttttgtttttgtcatgtaatttttaaggcaatctttgaagaaagatataatttccactatataaaggaagtaacagaggctcagaggggtgagatgatttatatgactattaagggtcagaggtaggatttgaattcaggtatttagattctaaatcatggcctctttcttctacatccaggctctgtatatctgtgacaggcacaggtcatccttgcttcctcaaggcatgttggatccaagacagaaaaactggtacaaaggatatcctaatgccagacgtgatcttgtcaagggttgaggtggtggataccaccacatgcctggctcctaacggagggagtaaggcttcaccagacctctgacccttctgaagccatacctttcacagtcaggtttgcctgaagctaccatgattcaccagcataccaaatccttcctgccagtggaggctacattaggctgggaaaggaatcttgtgaaaaaatagatctacttctcctgacccgtgttctccaggggattcagggagtcctctctcagactgctgtctcggttccacggtgattggcgtcctgagtaaatactctgatagactaaacacacgttgcccatgttggcccaggagcagcagtccgggagcgcgcccagtacagtcccctgtatggcagcccaacttgttaatcatcgcactggcaggctagccagaatggggatatttagcttggggcttatgcattaccatctatgctaatatggcattcttagaactataatttccgttctgacctccatggatactccttatagagaacacagacataaaacaattcttgaaatgtcaggaagaaattgcatctaatggagggtacctctgccaaggaaaacatacttcagtgttaaagcattcccatccaaacagggaaatttgaaaactgctcttgggtctgcattgaagcctgagcatttttccatgccctttaataacctgtaatgtatgtaccagccagctccactgcaggctccccatcaaccaagagggcttactgtgaaggaggtggggtggccggcgggaggtgatagctgagacctgtgtgagctggtgtcagctagaagaccttcctgggggctaaagcaagaagatttataatgggaacatataccacatgacataatgtcctacctgcatctgttacagtggagaatatgatccccagttgggtcttgaacccttggccctcctgatacctgataccaatgaagcctatcctccaccctttaggatttcatattaggagacacacaatctgtcttctgaaatcatgctggtgaacagataccacttagtaataataatattatgttgctaatagttgctgtcattatgagtgtttataatatgccaggaataaatactttacctaaattatctcatttttaccctgtcagtaacactgcattgggtactgctgttttctccactttacagagaaaactgccgcacagaatcgttagatcacttggccaaggtcacacaggtagtaagttactgacgtggaatttaaaattgatttagccagtccacactgttctagacctgtgcaagttgatcccctgagataataaaacaaacaaacaatgaaaagaaattatcttatcctctacacatttctattttatgtagatgttttacaatagatactataatagtacagaacttcatgtatgtaagttctgaataaataaatatacatatataatagaggtttgtggtccaattttttttttttttttactgatttacaaacatttggagattgctatacttaactataaagttcaatggaaagaagagagtttcttttcctgataactgatattgataatattatgggaaatctgatacttccagagggtataagccagatatttttgtctcatttgctcaccaccatattcccagtaccaaccctaatgcctagtagatgttcagtaaagaagatggccatgaagtttggaaaccagtgaacatacataatgctgactgaatgtttgtgtccactctctgctgccacggattcttatattgaaaccctaacccccaatatgatggtattaggagatggggcctttggaaggtgattaggtcatgaggacaaagcccttctgaattggattagtgtccttataaaagaaggcccagaaagctcccttattctttctgccatgagatttacagcaaaaagaaagccctgtatgaaccaggaagcgaggccttactggactctgaatctgcctctgctggtgccttgatcttagacttcccaggctccaaaactgtgagatttaagtttctgttgtgtataagccacacggtctatgatattctgttatgccagcctgaactaagacacacagtaaatttttcattgctatgacattataactcatgatatgttctgtgacattgtacaatatgcttaatgagctaccctacatgtgctccagtgtgctgtgcagaactgcagtgagccaggtgtactttcctcaagccccgctcaggcatctgaaccattccatataaagaaggcaggagtgagtgcttgcacagaaaggggttagggcaagtcggggacatggaaaagaaaaaaggaaaggctaaaatagacgaaatcaggtccgaattcaatttcatcaggtgatttttcctgattacctattgctccttaccttcttaccaatgactttcttttttcccactccattccccaccccccagagaaggaaaggtttttgcctgagtggaggtaatggggtaagcttccattaaggtggaagatttgagcctggcttgggataggcaggagaacagccacatttgaataatgtttctgtagaaacctgaacttatttcattctgtgagatagcctggttttctgcccattttgtgaattaagaaacagaggcttagagtgttccagcagctttcccaagcttacctggagggtttcctttttacgggtgctattttctttctgcttcactcctccaggagctggcccacattcacagaatgtgtctggaaagtgccataattcctccaggtgcaaagggcttagtaatttactccttcagtctcctgcttgattgtctcaaaattgaaaaggtttcatgccattttcagacatgcttaagtttctcaaagggggtagcccgggaacttgagacttcagtagtttttccttcttgaatgcccctgtccagccagtgccctaacttgtacaaatcaaggaaaatggtttgtgtggggtggaggtggggtgaatgttttcatttttcattagacgacattcgtaaacatacttgtgttttctgggttggtccagttgtcttgaccttcgttttgtaagtatcttgaagattcctttctcatccaaatctgttagaatcaccgcagtttccaaagttggctaaacatcagaatcacctgaggtgcttgttaaacacagggaatgtcctgatagcctctggagattctgattaagtggaccagttaccagaaagcagccccaatccaggccccatgagaggattcttggatcttgcgcaagacagaattcgaggcaagtccacagattaaagtgaaagcaagtttattaggaaattaaaggaataaaagaatgaccactccataggcagagcagccccagggctgctgtttggctgtttttaacggttatttcttgatcatatgatatattaggggtggattattcatgagttttctgggaattcttcctttcagaccatatagggtaacttccagatgttgccatggcatttgtaaactgctgtggtgctggtgggagtttaagtatggtaatgcattataattcacatataatgaccagtgaggacgaccagaggtcactttcatcgccatcttggttttggctgccttctttactgcatcctgttttagtagcagggtttttgtgacctgtattttgtgccaacctccaatgtcatcctgtgactctgaatgcttaacctcctgggaatacagggcaggagctttcagcctcattttacccaatgcctattcaagatggagtcactctggttccaaggcctctgacagacctagggcaagttccccaaatgtttgtttttaacaagcaccacaggtgaatgcaagggcagccagatttgggagccagtgagctatcaaacacttttaaggggaatacatgagagattccctgcaagagttaaactattttgataccacagtgaagggagcagaaaatgacattgaaatttcatcaaagctatacacctacacaggtgagattaccactcatcatgggaaaggatgatgaaaatacaaccaaaaaccttcatcgaacaatactctttactacatttactagaaaatcctagcaaattcaaaaataacatgtgaaataaagccctgaacttttcatcctttaggagcaggaagttctctttggggattggctgaagtagaaggagctctgcaagagccagtaagtggttccttgtctgtggttgttagcaaaagaatgaccatggctcacctcagaggtcacagagaagggaggtaaagaggacagttaatttctttaccaggatctaatttatcatttgggttttcagagaatgtgggaggtggctgttgggcttgttttcttttgcagcaaagctttttagagcatgactatgaggcaggcattgttccaggcaccctacactgttgcaccaaagtcccttaagagctgacgttcttgtggtaaagacagataataagcaactaaatgaaatactaatacagatcatgtcagtcaatgaaagtgatatgaggaaaatagggtaaaagaggggggctggggagaactcgtctctgaggaggggacaactttgaacggaggcctggctggcacagcaggtgccatcaggagacctgagagagaatgatctctcacacagaggcaaagggaataggaatgtgtgtgggaggatttcccagggagccatgaagatgacgttctgggctccaccctttatgcctctccaggggcctaggaggggccttagctattttgcatttgtaatttctcttaaagacacccccccctcaccaccagcccacatgctgcccactctgcctacccacacctagttatagaagctttagaccccataaaacctggatctgcccctgagaaccagaagtacaaatatgctgaagtagggaacaagcttggtgtagtctaagagccttaagaaaaaagaaaattggtgtagacgagctgtgcttaagatggagtttaatagtagattcattcattcattggttcatttattaaatatcaatttactgagtgccaggcactactatgaaaaaaataaggtccctgtcctagtggagcatccattctagtaaagagaaacagaaaataaacaaatacctatataatgtcccaggtgacaatggttaaaaatgaaataggtcaaggggggatatagggttagggtacgatggggtggtaaagtgtagctgttttgtaagggatgggaaaggaagggctctcacagttctggtctgagctgagatctggaggaggtgagagagtgggccatatgggggaagaatactccaggtggtggaatagcaaatagaaaggcccccaaacaggaacatgctgggccttttcgaggaaggtcctagaaattgagaaaagcagaactaggtgatggaggacctaggtaaggaatttggatttcattctatgagctgtgggcagcctttggacagccagtgctctagaagtctagggaaggagagagcatgggacatcagaggcctcacagctgactttaagatgggcctggaagtatccagtgggcagagttcagcatagaaagaaggccagtggcagccactgcagggccccaggcatggagctaggaaaggtaacctgtctgagggcctttgacagaccagtgctgcctggagctggagttctctgagggagagtgctggggatgaggttgcaaaggtacctttgcctgaagcatggagagccttgaagccaggccaggggaatttgatatttactaatgtgaatacctgagtgccctgagaatagtggggactccaaaatttctgtctaggagcaatttaaggatagctctcaggtggagggtaggggtgatggaaggggtagaggatctgtcttagagctagcaagcaaaagattttacctaggttgtgtatttacttgagggtggttttgggaaagggcagtggtaaagttttgaggtcttgccctaaagctacactgcatagcaaacacactgtttttacttggatggtatcctatttggggttactaaggggatggggatcaatgaaaattatggggcattaatccttggctctgtcctgggagaatgaaaattacataatgaaaggtgtgatttagaaaggtggtcaagagtgagtgtggggaggcattcactcattcatccattcatccacttagcaattgtttatgaatactccaatgtgccaagtggcagaatggaacttgtatattcctgtgttcacactctgttcctaccacttactacttgtgtcatcttgggcagcttttatttaatctcttagaacctcagtttccttgtctatagaataataataccagcagtcccctcttatctgtgtgggatatgttccaagatgcccactggatgccaaaaaccatggataacactgagccctatatttactatgtttcctacacatgtgtacctatgacaacaataataactagtaagataggacaattatattaatataccgtaataaaagtcgtgtgaatacagtcatgatccctctctctcaaaagattgttatactgtaccacatgtaactgaaacagtagaaagtgaaactgtggataaagggggactgttgtaacatgcctaccctagtggtgcttgtgattagagagaatgtgcatacagtgtccaacccagtgcttggcacctagtaggtgctcaataaatggtggcgcctactgggttgcagtagatggagagtactgtaggcagaaagttgttactgtggcagcacagatttcccacagtaagggccttcattagggcaagggtgaggtttgtagggcaggagatagttttgagaggcttggaagaacatcttgaataggacttgggtcctgaaggataagatgataatgtgaagataatatgaaggtcttcagcagagaaaatgtggaactagatgcccaaacaagaaggaaaattgggaagaaagtagactggggaaggagtcacactttaggttgaatctggggcagcagccaagtggagagagtctctagatttggagaatacagtggtttgcaggagtgagacctgggctaagcagacacattgattttaatatcactgtgatggcatactagtcaggatacaaacttggttgctataacaaagactcccagataacagtgacatatgtaagagagatgtcagagtaatccatgcagggctttggatccttgtccttttgctccacttttactaattggtagccctcatttgaatgggccaaggtggcacgtcagtgtgcctacattccactcccagggagggggagatgggaaaaagtgagggcacacccagctcatttgagggcacaacctagatactgcaaacccaacttctcacattctgcaggccagacttggtcatatggtcacacctagctgcaagggaggctggacaatgtatactttattccaagaggcctgattcttagctacagttctattattttggaagagggaagaacagatattcaggacagctagcaatctctgccataagcagtgttaaataaagacctgagattggatgagaacatggagaaaaagagtgtgacagaagtatggtctgccctcagtatccatgggtttttgcatccatggattcaaccaacctgggatcaaaattattggaaaaaacattgtgtctgtacaggcatttttttcttgtcattacttcctaaacaatacagtataacagctatttacatgaaattaacattgtattatgtattataagtaacctggagatgacttaaagtatatgggagcgtgtgcataggtgatgtccaaatagtatgccattttatgtcagggacttgatcatccttggattttggtatctgttgggggtcctggaaccaatcccccaagataccaagggacgactgtaattagttggattccattatggcaatggagaaagacctaagaagttaacgaaaaacatggaagatagacaagtaggcaaaatgggatggtgtgggttgtgggatggagcagtggttagctgtgtctgatcctgcaaaatgcaagagaattccatttggtgattagtaacatattgggtggtgacaagcaaagtctggactgcagaggttaaggcatagacaattagaggcagtggacgtggattaggctagagaggtttggcaaacacaaggaccttggaaactccaagggccagccaggttacgtgaaattaagttcaaatgtctgaaggggtttacagatattaattttactttttttcctaattaggaagaagctttaaaaaaatcctcttaactacaaggacctaatccttttggggagtttgctaatataagcataaattttttctttggcagtttttttccccatctccctcagataaccttatctcaattttgaatcagaaatcttatttatagcttttctggagagaattatttcaaagggggcagattctttgccctttggacttattttctttttaagaacagataagttatccctcgtttttctcaggagagacagttaaattattaatttaaaaataatgattttgagctgaaagggggcgtaaatcaaagttggagaaataaatccagctgcttcctgtttttgtgtttcttttcttcttattcttcttcttttgaagggaaactaaaaatgccaaagtttcatttatcccccaggaccagaagagaacttagcacagctcacaatccttaatagacctggaatgaaactgggaatggcatggccttccaggatccttccttccaccctctagctttcccccaccaccgtagcagtttccatttttaccgttatcccaagtacattgccaagcaagtgtgactcaggggctctctcggctagaaggcctctgagcctagttttgaaggccatctgagtcctaggcctttgtgcgtgacccataattatctctgcaaagatgtgtccgttgagtacttatatgggaagagaaggcagaagggcagctgcagcactccctgcacctggtgactcgctctgctggcctcagcccatggggatgaggcccatgtaggtggtggtagttctggtgctcccagccctgttagagcatgtgcagtctggagatcagatgagatgggtttgaggcctctgagcttacacacacactggatgttaggaaaaggaactgtcacggatgtttcacaggcattgagtgggcaactagtctgagtcccacagtgagtccctgtctctgaatacatttcttctgtatcgctctagctgggtggctggtcctcctcagctgatcagtcccagcagagctcatttctaaagaggccagggagtcactgatcagcagagctcagccctcaggaagctgaagaggaaagtggatggaaccagtggccccaagagcaacaatcccagattcttacccaagccctggaagctaactcgtagggtcattgaggagtgagtgagttaacgcaggtgaagggcttgacatagtacatagcacattgtaagcatttaagaaacattggctgttatttattatcagctggacccaaggcagtggcccaaattcccttaattcccactaattcagtgtgtctgaggggtccttaatactggcattgatttactttgtgaatcactcacaaacattgtgatgccttgtggaaaatgcttgtggaaccaactctgttgagaaagacatttttaaaacttaagtttttaaatattttgaaagcaatagatgcctgtagtgaaagaattcgaacctgactgaagagtataaagaaataagtcttctcccacttttcccctaattctcagtcctatttcttaaacttcaaaatggttacttggatatccttctgaaactttaatgtaatggagttgaaaacactaccttgcagatatgctaagaaaatgtagcatctattttattaattaactacttttccccaagtgctacctccttcctagttggggagggccaatagaagtgggtaatagagttgaatttaagccctggcatctggacttgacatcctctgcttcaggtctggctgggcgtcttgggctggtgtctgttaaggaagtctatggctggtgaacttgtaggcagttctcctggtagagattatatgcaatgacaaatgtagcaaacatctcctatcaccatcggctccttctgcattttcctgagaacagtggtagccttggagtaccttcctgcagcctgaatgtgctcaactgccagtgttactatgtcgttgtaatttcatgcaactgcaggatctttgggtatgggggtccctctgtcccccgaggaattcctagtgggaagtagggtacatgctccaagcagctttctcttaacaaacataactctgaccctcttcatctttctggaatttcattcccatgtgggagatgcgaatccatgatgccaacaagcaaacctcttctttttccttctcctgttgccccaacaacagaggatgaggacccccccttgcatcctattctcctcctgccctcattgtcccaccttccctgagggagtgggagagtggctgctgggaagggaatggaaagcacatgggttgcatatcttcaaaacatgatctccactgcatgaagtctgtcagtctgtctgtcagttgatctggccattcattcatctaacgtttgtctacatagtgttttgtaacttgctctttaaccaattgataaccctttttttgtttgttttttgttttttttttttttggagacagagtctcaccctgttgcccaggctggagtgcaatggtgcaatctcagctcactgcaacttccgcctccggggttcaaatgattctcctgcctcagcctcccgagtagctgggattataggctcatgccaccacacccagctaattttttgtatctttagtagagatggggtttcaccatgttggccaggctggtctcaaacttctgatctcataatctgcctgcctcggcctctcaaagtgctgggactacaggcatgagccactgcaccctgcctcaataactcttaatgacctttccattgcagcacttaccacaattcctcattctttctaacagctgtatagaattttgtcatatagctatatcaaattttatttactcattttcttactgacatgaattatttattattatgcaagtatgtctgaaaaatactttatgccctctgcctatgttttctttcctcttcctttgcaaatttccttacttgtcacctagtgtacaatcaatagtatgacagttaacttattcttttttgtgagtcccgcagatactctccatgcctcctgtatgcctgtaatcctttgcttaacaatttgacaacgagaacataggattatggtttcgggggaagaagcagcaataatggcagttaaattttcaattccccaggtgcatatgtcttccttaagtgcatactctgagtcccaagtgagaggagaacatatttagaaagaattgtaaattatttctctttgccaagaggaagggaaggagggtcaaattacgtggttgatcagttaggataaatcctgaatatggtagcttccacaatttaaagttttatcctcttacataaaagaggtctggatgtaggtggcagtccaatgctcatatagtggatctatgaaatcatatctttctgctacacctatgtccgtagtatgtagtttttacccttaggaccacaaaatagctgctggcactccatccatcacatcaacattccaggcagggaaaagtaaaagggtaaaggacaaatgaagcatgtgtcagctatctgtctgcctttttaggagctttcacagcatcccacataacacttctttttgcatctcactgaacagaacttggtcacatgcccacatctacctgtacctaggcacagtgccatcctgaataaaactagagatctgttagtaaagaataagggaagagttgtgtattagtctgttctcacactgctaataaagacatacccgagactcggtaatttataaaggaaagagatttaattgactcacagttcagcatggcttaggaggcctcaggaaacttacaatcatgactgaaggggaagcaaacatgtccttcttcacaagcagcaaggagaagaagaatgaacaaaagggggaaaagccccttataaaaccatcagatcttgtgagaactcactcactgtcatgagaagagcaggagggtaaccacccccatgattcaattacgtcccactaggtccctccaatgacacgtggggattaggggaacaagataagatttgggtggggacacagccaaaccatatcaagatgatactgggtagacagctagcagtaactgtctcttgtgatttgatccatggtttggatttctcctttcaccgagtgctgacatatgggtaatagttgctactcagagcagagatgtgcaatggcttcagttgatttcctcaccctcccccatcgtctgggtttcttcctccttccttctaaggatcttgcctcctgaatgatcagggaaccccagtgtagcatttggccataatgtagaagcatatcacatgtttaaagtttctttttctcaacctcttcttcaaaacttatctgttgtgtgcaccatctttgctgggcacagttagacagccggcttgctacccgaatcaacatgagctaaggagctaggattcactggcttcccattccagctccagttcccattgccctccttacccttccaagtccttaccctccagctgtgccaaatcccctgccttggattcttcatgtccttcaataagtccagacacttgcaccagcagccccttcaacctggagtgtcctcctcatcccttcacttcttctgcagcccattcccagcgttctctgctcattttaaatgacccattttgagcatcacctcccacgagaaggcctctctaatcccttagcatcactatccgcttttgatgtcacagagtcccccaaatgcactgctgtgacagcatgtatcacactgggtcatcagagttaacacacaagcccatttcccccaggtagaccctgcacttttccagggcaggacagtaaatttaccacacaacctcttacatctaaaagaaacgttgttactcattgttgaatgaaagagaatgaatgacaactttcagtacttagatctacagagagaataaaagaattttccctctggtggggagatcttttgggaacgggagaccttcccacagccgtgttgtgatgaaggtatctccttacttcgtcgaagcacgagcatgcttggaattgctgttatattaaagttcccaacagcagctctgtggtcaagaccgtcaagggagaaggtcttagtttgtgcagctgaagggactcatgagacatcatcagccacttgaataaaatgctgggctttctataatggtttatttttgaataggaacaggtccttggcactaatcctgtttgaatcctggagctctgtttagcagaaagatgagccggagacctcaggttacatttgttgctcaagtttgaccagacacttgtgtaagtgtgtgtcatgccggactttgcttaagtaattaacattcctgtcaaggctccttaaaagggtcctgtgttatagagcccctcaaaaggctgatttaaaactttgaactctcagcctttccattcattgccaattactgatatgcttaaatttcatttttctaaaaaaatacaaaaaggattaggtttttgaggagaaatgtttattattaggagaaccaaccttggaaagtaaggtgattttgaaagaagagagtaagtgtagaagtggtattagagaatgtgttgaggagggagtctgaaaatattttttaaattaggaaacaggagaattaacatgactatgacaacagctttcaaatgttttagggactgtcatgaggataagcaatttgatgtaccagagggctgaactagcattttcttttctttcttacctttcctttcttttttctttctctttttccctttccttcttccctccattcatcctttcctcctttttgacattccctctttttttttaaactccccttaagctcctttaatattataaggtctggaacaaaaaaacaacaaatactggcaaggatgtggaaaacggggaacccatacactgttggtggagatataaattagtacagccattatggaaaacagtatggagattcctcacaaaactaaaactagaacttccatatgatccaataatcctgttactgggtacatatccaaaggaaacaaaatcagtacattaaagagatgtctgcattcctatgtttattgctgcagtattcacagtagtcataatatggaatcaacctaagtgtccatcaatggatgaatgaataatgaaaatgtggtacatatacacaatggaatattactcagacgtaaatataatcaaatcttgtcatttgtggcaacatgggtgagcctggaggacattatattaagtagaatatgccaagcacagaaagacaaataccgcatgttctcactcatatgtggaagctaaaaaaagttgatctcttagaagcagagagtagaatcgtggttaccagaggctgggaagggtaggggagagtggagagggatatgaaattacagttaatggatatgaaattacggttagataggaggaataagttctagttttcgacagcacagtagggtgatcatagttaagaacagcttagtgtacatttcaaaataactagaagagagaaactgaatgttccaaacccaaataaatgacaaatgtttaagatgatggatattccaactaccctgatttgatcactatgcattgtgtacatatattgaaataggacatttatctcataaatatgtacaattattatgtgtcatttaaaaatttaaaaaataaaattacccagcactttgagaggcccaggcaggaggatccgttgagcccaggagttcaagaccagcctgggcaacatggcaaaaccccatgtctactaaaaatacaaaagttatctgggcatgttagggtgcatctatagtcccagctacttgggaggctgaggttcaaggattgcttgagcccaggaggcagaggttgctgtgagctgagattgcaccactggactccaccttgggtgacagagtgagactgtctcaaaaaataaatgaaataaaattatttttaaaaagattataaggtctgtaagaataggagatggatctaacttgttaacagagctcctcttgaataagtgaacgaagaaatgaatgttattacaatgtgccaagcactgagaatacggagatgaaagacataagctagaaaagaaaaatgacaaatggttcactgcaatctggagatgttaagtacctggagatgtaagtacagaactgctaagggagtgggagagggtaggtgtctgcccctaactgcagaaggaggagaagaggactgagaaaagcctccctggagttggtgatgatttaactgcatctcaaataatgatcagacatccatcagatgagggagcggggagagtgcctcaggcagggtcaaatgtgagcagagccgggagtggagagtgtcacgatggaggctgagctacctgtgggaaagtcaaaggtgggtctgatgggagatgatgctaggtgaggtcagtggggccacacagtgtatagcaagtgaaggaatgtgggttccatctggatgtgatgggatacacccgtggattttaagcaggaggccgactggtaactgcgtgaagggcacctctgaggggaaggagaaaattcaggagctgttcagtagaccaggcaagatggttctcaagaccaggtgaaggctggaacttggacatatagggtagagattggagaagaagggacagatatgagaagtattaggacttccttcttgttcgggttggttgactagatagacgatagtgcctggtgtacactagacagtgagtttctcagttatagatgacatctgttatctttacacccttaatctctatatcagtatctgatacctagtaaggtttgaactttaatactgttttcttaacaagtgctttaattaataaattatttcatgatagtaacttaatgtgccatatgtgacaaagagtgctattttttttctcctaatatctatttctcttttagaaaaataattctgggctgggcgcagtggctcatgcctttaatcccaacactttaggaggccgaggtgggtggatcacctgaggtcgggagtttgataccagcctgaccaacatggtgaaaccccatctctactaaaaaatacaaaaattagccaggcatggtggtgcacacctgtaatcccagctacttgggaggctgaggcaagagaatcgcttgaacctgggaggtggaagttgcagtgagcccatatcctgccaatgcactccagcctgggtgacagagcaagactctgtctcaaaaaaacaaaacaaaacaaaaaaaaaaacaaaacaaaaagaaaggaagaaaaaaaagaattctgatttgtagatgagtactttgctttccagtgtaagaaaagctacatttcccaggctcctttacggataggtgtggtcatatgactaagtcctcaccaagaagatccaagtagaagtgttttctggaaccccaagaaagactcctaaaaggtgaagaggaagaaccttcagcccctccccgctgctctcctctccatccttcctgctgtctagaatgcagacgcactgcctggggtaccagcatccgtctttctaaggatggcagagcagtaagatagaagaaatctggccttttctgaccgtgaagctactgtatcagtcttatatttttttgagcaaaagacacacttccatttatactacttactttaattttaactttttggatacatgtagctgagcctagtcctaactgggacacttaggaagtgttcaggtatgtaatctcttttgactttaacagctactctgtaagatatgatcatccttatttgacaagtgaggaaactgagattcagaggtattatttgatttctttaggggcatatagccacctaagtcttctgacagagttcacagctctttgctaccagatcccacttcccttagcaggcacacagcaaatgcttattaaatggaattcgcccaaactgcactgtgtttctatacctgctttgggttgggtttcatagcaagagttcagtgtcttgttggcttccctgggataaataaaatcaattctatcctctttcttcatacatatacctacatatgtatatgtgtgtttatataaaaactgacatagcagtctgaattcaacttacccattccaccaattcttcatcaaatatttatacaaatcttattgtatgtctagaactgtgccaggagtagtgaaaacaaaaataaacaaaaataaataaatcacattcccttccccactcggagcttacagttgatcttcgagggttctgacgaatttatttcccttcctaattctgaggtgatagtagattaatatgccactttatcagtttgtatgaaattagttgggcttttcaaagaaagcccataccctcagcagtggggcagttttgatggcacaccatgtgctgatattaacacgtggtggtctgatttaagttgtgattcttggtttctggatgtgtgctgtcacatttcacctactgtgtctgagcacctggttatgtgggccagaggcatgacctgaagcttcagcaactttttgagaactgaggatgagtttctaagctgggccttaagatgcttcgcagttgaaaacctaggcaagggatgtgctaagagtttgcttaggtgtgaagtctgtgttcaactttccttatggccttatctctcaacaggtacaaggaaataaaaagaaagttctagtattatgattgtttgttgaacacttttaaatatggcatgcactttacatactatcatttcattctaagaactccatgaagtatcatcatctgtattttacagatgaaaaaactgagattcagagaagttaagaaatttgcccaacgttaacacagctggtaaatggcagagctcaaatccagctctatatgactccaaagctccacactaaactggcccgccttctttggttactttagatgtgtgtatttacaatccatcctcattgaggctggaccagaagagtgagaccaccttgcttctcggcacttgctcatggcaaaagttgccagtactaactggttactacgatgaagagtgttgtcgttggaaactttagtaatagtgtttctgcatttaacatctccccagacattacatttgcttaggaaaaaaaccaacttgttaaacctgtcttagcaaactgaccacaatttgtaatattttctttaaaggaagaaaaattaaaccctgagtttccaaaatcccataaagacagtggaagggctctttccaccagggacttgcgtagttgcatgttgttgcctccgagaattgaaagtgtttaaagcattattttattctattgtgctgttatcacctcaatcagtataattctacacttttatttcctggtctagggactcagttttgatgagatttattgctttaaagaggatagcccttttttggagactatttagtttcagattagttgacaaagtaacgaacaagcttggggtgatcttgaactaaataaacgtcatgggaggcagtggtgctatcaatgaataccgcaaggactgtggagtcaggtaaacctggctcctctattcactaactgtgtgatcttatacaagtcactaaacctctctaagcctcagtttattcccctttaaagtggggataggactgttactgatagtaaccccttgtaggattgttatgaggattaaatccgatgttagagcttgggtgtagtgcctgacacagggcaaatgctgaacacctgccactcatggttcgttatcattcttatctttatgttctatcatgtaatttcgccaatgtggttaaaaccagttagttccctcggaagttgtcaaacaaggagacaggcataatatgctcagcaattggagatgccgctctcttggttcagttactcagagctgtcaaagcgacagtcggaatccccttcctggagtgttggctgtgcctcctgggtctcccgcgtggattcctcacagatggcagggcacatcccagctcggcatgtcgacatagtcaccaccatggcttttaatgagaaccattcattgtagatggacgcttttgagttttgtacagagataaacagatggcaaggtttgtataatttcctgctgggtaatctggtactagaagtatgatctatctggaaactacaaagtgttacctagtctaaggtgagtttttacaacagaagttaaggaaaggctgaatgggtctcttatggaattatgcccaaatgttttaccctcaactctcattcaggctgttaagtacagttctgtcccatctcaactaagcagtcttaacttagagcttcctgtttctttgttttgtctttttgtaattactttttctgtttgtttggctgcctctgaaaatactgtttcagggcagtcaagttttagctttcctttcaactgagggaactggcattgcatatggtgaggctcatcttctttactggaaaatgaccaagcattgaaccaatcgcttgaaaagctcttacttcagatcaatttcctgtaccaaatgatatcaccttactaggaggccttcactcttgtttttcaatgacccttatttcctctgcttatatgcttgcattctactttggttaggtgctgcctcatcagactggactcttaaactcaatcaaatttagttatttgagcccaccaggtttgggattttctaaaattagttcttaaggggacttgatatgatttaggagaagctcaaatgaaaggaattactgtaagtaaaagatttagaatggtgcttggcacataataagcactcaataaatgctagcaattgtggtggttgttattattccatcattttatgcaacttgttggatagattctgtatccaattgtgggaataagtataagaatttttcattccttctggagaaatgacatcatgagaacccagactgagaaaaaacattcctgcatacaaggtgaagggtgacatattaaagatactatcctataacataaaaaaaatacacagtttcctttactggctcctcttacttttttaaatttggaaatggattctcgctatgatgctcaggctggcctttgaactcctaggctccatcgatcctcctgcctcagtctcctgagtagctgggactacaggtgcatgccaccacccctggcctccactcatcttaggagttctcctcctctatccctaccaccatcatcaaccctgttgggttcacctctatttccagcatcgaatacagtacctggcatttagaagatgttccgttggcactgaactgctctaaagtgacctgccccagtcctaattctgccatgtactatttgtgtgactttatcactaaagtcagtgataaaatcagagtttgccctcagggccccagcttcctcaatcatagaattggagggggagcttggactctaggatctcctgagttcctcctggctctgaaacttgatgtcaccttggggcatttgggtttctgttgactggtggtgtgctggaacactttatgcataaacattcatgtgaggatgaagtatagttttacacatgttttttatcctggaaagtgaaattagtttgggaagttcttcttacaatagatacacaaattccttcttacattttgtttcctttaaggcctatggaaactggtggggttgtctgtgtgcatatgcctgtgcatacttctgcatctgtttataatttacagatagatggtaagaattttttctgtcagatccaagaatgttaaatagttgtatccgaagctagtcatccacttttaggaatatgttctagcgaaatagcctggaatgtagataacgatttatggataaagtgactataacaattttatttacagtactgacaagcagaatacaaaataaaatgctcagcaataggagaatgattatataaacttgataagaatatttatactaaagagccatatacaaagatattttgttccacctcagctatttagaacagtagatataaaaagtagaggaaataaccccaaatgataatggttattactggatagtggatcatgaaatatttttattctcttattaacacttctctttctgttttttttttacaatgagtattatttttcgtatgagaaaaattatatttaaaagttcaaacctcatctgaaatatagacaatcctggtaataaacaccaaaaatgtcaatgcaggtttcttcactgcgtgggaaataccttgacagaaaacagtgagatggatcaaactattctgcccccgagtttattgtatacacccactagtttcatgcttggcatcaggaccttctttgaaaggtcctaactatagcatctgttggactgtctggctgggctccatgtccatggcactgcggttaaaggcggaaagagaaggtcaccctgtaaacttttctgccaatgaccacagcagcacagccagcatatgtctaaatgtgcaggaatttgttcaacacagagttcaatgtttatagaagggagtgcagacccaggaaataataaaatgaatgaatttaatttcccactaagtgttttgtgatggagagcattaaataggagcttccttggaatgctattaatgcagcaaaccctcagtatcactttactccaaatcctggattctctaagcctgcaggggggtgtgggagaagaaatcctatctgaaatcatccagactactgtagttatgccagtttctgattgtgtgaccttggacagtttactcattcactcacaaaatatttactgagttgctgctttttgtgccaggtgctgggaataaaagaatgaagaagatggaagacttgctgtcataaagattaatgcccattggggttggaaggagatgcagacaagatatttcacttcgttgcaactcttgttttctttgtcttttccttgaattctttggttcttcccagtttggtctcaggccttctctcacattgtgcaatctcacttgagagtttcaggctctcctgtccttgcagatactgcttactgaggaaggattggccatctataagtctaggctggggtgccctcctgagctatggactcatagcactggtagtcagctggatagttccccttggcagtctaacaactgtgtataagttggcttgttcaaaactgagtttggtgtcatctccacttctcttccctgcaaactggcttctcctgtgtttcctgtccccatgaatggccccattgtccatccagtgtccgagccagaaatctccgctcttccatgtgttttccacccctccatgtgtgatgaaccgtccagttctgtggattccccctcccgtgttgatctcattcatttcagtccccttctttttaatctaaccactacctctcttgaggtttccctgccacctgtctttctccctttcacattccagacagatgaatctgtctccttgtaactctgatcacatgactcctctgcacagtgcctcctgcctggctgcccactgccctttctctttaatatggcactcctgagttctccagtctaattacctgcccactttttcctcaaatcttaagactttagtcataaatcattactttcttttatccatatcatactcattttaccttatgacctttatatcttcatgcatgctgttacctctgtttagaatgttctctcccttgcgtcttcctcccccactccttccctcatttatctgaaccaccccatttcattctttagatattgaatcagacactacttcctccaggaaatctttatcgaattcccaagtctaggttggacacctctacttcctgttgccatagaccctgtacctcctccatcatcaccattaagacactgcttggtctccttgctatcaccagaagaccatgggcttggtgagggcagaggccaccactttttgtgtttctagaatctagcccagtaatatgtaattgtaggtacttaataaatattgattaaaagataaatttttgtttctccggatgacattagtctggacataaaagtaaggttacacagtaataataataacacaccaattgttttgttctcttggtccttccttggaccaaactctggttataactcttgcttcctttaggaagctcttcaacctctctggcaaactcacattgtgtagttcatgccactgaaccctaagatcaaccgcacttaaaaaaatacattggtataaaaggaatcatacatgggctgctgtctaagattctgattagaaaggagaaaaatgcctaagtaagaataatagttaacattcactgacagcgtcttctgccaggcgccttctaactactttacatgaattattttgatcctcccaacaacgctatgagcaaagtataattatttccattgtacagatgagaaagctgagatccagagaagttaagcaaccagcttcagggcacagagcagaagtggtggaaccaatgcaggcagtctgattccatggtcaccacccttgctgcctccctctatgaactctaaaaaatctttagctctaaccttctatgtttctctggttgtcaaaagcaaaagcgagcctggctaataaggcatttgcaattgcagggcttcctctcactcagacagtatccctggttgctggaggacccagccagtacagatgggggtcagtcccctctaagccctctgtgatcacatccttatttcctagatagatgttcatgctgttcatgagagacagtatagcacagtggctaaaaagtggactctgaattctgactacctgagagcaaaccacaaccctttcactcattaggtatatgaccttgggcaaattatttaaaccccttaggcctcactttcctcatttatacaaggaggatattaataatattacttaacccataagctattataaggattaaaggagttaatatatgtgtaacacacttagaacaaggcttggcccacaataagcactaagtgtgcttagtccactttttgattagtatttttgtaattaaaataatcttgttaatatttactcaagctggtcttagagtgctttgattaagtaccaggttagctcaactactgattgagctgtagatatctggtagatacctaccagttctttcatctcattatgggctttaatatatatatgtattactcagaaagataaaaataaatcatctgcaaaaccccacttgaaaggttttcataaatcttgtaaaagttgggccaagtttaaagattgctgcccagattggtttaaagcccttcattgtctacaatctaatggggatgcttataaagggaggatctggaatggtctgtctggcagtgtgtgtggtcaccggaatcacggccttttatctacctgatgggtatgagtaggaggagttggctcaggctccaggaaagtcagcagatgataaagcccttgtcctcggtcttgctcatgccagcagttggagagcagtatattgtgtgttatcaggttctcagaccctagcctggcattcatgggctattctccagccttgatcaaacccacctttccactgtataccgttccacacttaccctttcttttgcttagaattttctcaccctatctgagtaagacctaatcctaaagaggcccagattaaaagccatttcattcctgaagttttttcttagcactctactggctgtgttcttttcctttgcactatgcctacgtctcatgcctgttttccctttctatatttgttgtgcttataggaatttgccatctaacctgggctctcaaatacttaaagttttcacatccatccttttatttagaccttaaaacagccccatgaggaatgtagcattttcatcctcacttttccgatgaggaacccagggctcagagaggttacgtgatttgcctaaaacacaaagttttaggcaaagttaagtcagactccaactttggtgcattttttctctgccccaggctccctccttgaagtcttatgtcatgtcttgctcaagtttgtatctccctgcagtgcctagcacagctttaggctcagtaaggtttttttatttatttattcaacttacatttattgtatctatgaggtgttagttaggtcttgggtactagcattaagcaaacatagatatttgtggaagaaaagaaggaaagaagggatgtggacatttttgttttacttagtaaggtgggtggcatacgattcataagctcaaatcccaaccagggcaggtaaaaatgagttaagaaggttgggcatgacccactgaaaagtaatggggactcttgctaactggacatcaatactgtctaatggaagcgaccacaacttaattccagttaatcattgccatgttggaatatgggcctagtgttttgagattttccattttttcaagaaaagctggaagtccagacttactatacagtttctttatagtcaatgttgccaactaatttgtttttattttttaattgaacagctaaacaatacatggctcatggttaccactaacctccttgaaatgctgaggattgagccaaccatgcagccagtggtgcccacgcttctgaggcagggagccagtgctcaggaagggcaggctgctgcttctctccttctccttgttagcccccatgtgggtctcacccacctgcaggcctgtcttggctttgcagcaatactccacctctttgcccctgccctcctagcttgtctcccgttctttccctgctgtcaggggtggtgactgccctgtctccttcgcagagatcctcgacactggatctcaccctctaatttagctccttgtctttattgcgatgaatgaggttgagcagatgacaagcagagatctctgggcagaagatcaaacgctccccctgggctgcccagagcatatttatgactgctgctttgggaagttccacccacgataatgcgatgcctgcagagagtgaacttatctaccctctccatacctctacccagtcccagtgggaagatagagatttgtaaagaagacctcagaaaacagaatccgtgacaatctgtttggaattttctcttcagctttgtgatttggtgactataaattaatagaacactcatgtaaaatatgactggagatagttgtgctaagtgactcctgcttcagggactagtcatagagtccccaatattgggacacagggtggctcaaaatacaattttaggggcatcagcaacagacttgctggatgtttgttaaaaaaaacccaatccctgaacttcatcccagatctaggggtggggtctgggaatatgcatcttaacaagaatcacagcagattctgatatatgtgaagattagaaacctgtaactaatgataataatgaacacagaaccctaagtattctaagtgctatgtatttatttcttacaacatgcctatgagacactggtttttctaagtgtggagtagatatcactgtttgcaattattttgggtgctacacggagacattttttaaaaaagatttcaaagttatgtgtttaacttacatataaaactcatatgtgtaataaacccactaaacactcataagttcatcaacattattgcttaagtaaaggctaaatgtatttaaataaaaatagtgaatcaatttaaagggaaatattaaataaatactaattctggtaacaaacattgtgagggtagaatggggaaaattcaagtttgcaaagcattgagatgagtggaaaagctctgtactgagtcaaagaatttgggtttaaaccttgaattaaattcttactagctgtgtggccttgagcaaatctctatctctctgagttttagcttcattcttagcaaaatggaaatattaaaacaaattcagctaggctgtggtgaaaagcatatgagaaaaaaaataaaagaacacttaataggtggtcaagaaatattattgaatataaatattactctaatctttctgaagtattaattcaatatgaggtgtttttcattgttgttgttttgagacagagtcccctgtcacgcaggctggagtgcagtggcgcaatctcagctcaatgcaaccttcgcttcccaggttcaagcaattcttctgcctcagcctccaatatgagtttttaatgtggacattacttgaatctcctttaaaacttgttagaaatgtaaacccttttttttcttttttattgtttttagagataggatcttgcgctgttgcccaggctggagtgcagtggtatgatcgtagcccactgtaaccgcacactcctgggctcaagcaatcctcctgcctcagcctcctgagtagctagaactatataggtgcacaccatcaccaccggctaccaactcttatttctcatatctttctctgagttatgttttcactacatttactgaggtatgagggggacagtgcagaacttgggttccacctctgcctttagctatcgatgtgatctctgacaagacattttgcctcattgtgcctcagttttataatctgtaaagtgggattgcactcaaagacttacaggttttctcccaacgtctttgtattggagctttttttaaattatctataataaactgagaacagtcagagcatagattaaatatcacttttgcccagtaggcaattggccagaactgctctacagtggcccaacttacaggtttcatcttctcacgttctttggaggtgctaacgagcagtaaaaccaaatggctggcagaaggaagaggaaaaaagaggatactggagcaaggaatttggattctcttcaagctcaaaatatctcccaaacgaataaaagttgattatgtttttatagtactatagttcgatggtacgatatatcttgttaatagaatcatgctggcactggactgaagagattcatgattaagttatgtctatttctttctgccttagaaatagcaatgaaacctggattttttttatatgggagctcttcagtctttaaaaaactgaattaataactgagatggcataattagctgcctggatgagctctcagaaatcaacttttctttgggtcagctgtcttccagttaagcagttatgcggaaacctttctttttcatgcccggaagtataaaacagaaaaatcatgggatgctgaaattgctgaacacacacgaagcggtgccacagtgtccccaccctgtgccaaagcaaatttctgagcgttatgtaatttctccctggctttgagctcccgtgatcctgtctgaggtttatgctatacaatctgctaaagctgagctctttcaggcacttccttggcgggtgacatcttgtcaatattagagacctgtgattgggagaggggagagaggctcccatcatttcagtctacatccagcaccctgcattttccaaaattcatgctggggattgctaaaacagacggcatttgttggctgaagagtaaatcacgactttcgtgggtacattcattcatttggaaagtatttttgatcattcactgggctaatagtgctgtggggaatttgaaaaaatgtattttatatggtttcaaaaacaaagtctatggtagagcttttgccctcaaggaatttacagtcctttagagagccaagacatgcatttttaagttaactaacagcatgcacaaaaactagatacccctgtgatacactagtggtaaagctagcaaaaggtaatgtcatggagtgtgagttctggttgggtgatcttgtctaattctcttacattcccagtgaagaaacttaaccacagaaaagtaggaaaggccgacctgaggaagcacagccaggaaaggattgcatttaggcttgaatgcaaatctcataatgctttttgcactctgctttctgctaccccacagccatctctctatatgtttaagcatgaaagtggtgatttcagaaaactgttgatgctcagagggagaaaattggccaactttaggaatcaaaattccaatattgctccaggtaatgccagagaaacataatttgacctaatgtggtccacatctttctagtccagtgtcaacatcattcattaactagatatacactgttatgtactataaaaccataaccaactttccaccattttggagaaatttctagcataaggagaatctagatccctggtttgtcggtgtcatcttttttcttcctccttttgtcagtcacttggtcatattgctcattagcaccttcaaatggatataggaaaatgaaactacaggttgagtatcccttatccaaaaatcttgggccagaagtgttttggagttcagaattttttggattttggaatatttgcatatatatggtgagatatctaggacacaggacatgggtctaaacacaaaattcattatgtttcatatacacctatattagtccattctcacactgctaataaagacataccccagactgggtaatttataaagaaaagagatttaattgactcacagttccgcatatctggggaagcctcaggaaacttagaatcatggcagaagggaaagcaaacatgttcttcttcacataatggcagcaaggagaagaatgagagtgaagtggggggaaagccccttataaaaccatcagatctcatgggaactcactcactatcacgagaacagcatggaggtaattgccccccatgattcatttacctcccattgggtccctcccatgacacatggggaattatgggaactacagttcaagatgagatttgggtgaggacacaggcaaaccatatcaacaccttacacacatagcttgaatatttatacaatattttttagtaattttgtgcctgaaacaaaattttgactgcattttgactgtgacctatcacatgaagtcgggtgtggaatttttcacctgtggtttcatgttggcgctccaaaagttttgggttttggagcattttggattttggatttttgggttagggatgctcaacctgtagtgagttggctgtcactcagcagctctggaaaattacctgtctgcactgaatttcctcatcagtaaaatggaaatgattatagtactgaccttgtaggattattctaaaaatcagagaagttcatgcagcttagaacagtgccaggcacatggcaaatgctatggcatacttaagcatcttcctctgtggtgcctcgtcatcaccatgtgattgtgccttgcttgttcctgtttcacttttcagagggagaaaagtggccaactttaagaatcaaaattctgatgttacttcaggaaatgcatagagccagagagacacaatttgacttagtatgatccacatcatcccctcaggctgaatagtggtggcatgcacatctataccaaaatgttttaccttttttgtagaaggaaaatatttgtatcttctattccatatcttagatctttataagagcacttaagttcaacctcctaagaaactgccaattttgttgatcacgatagtctgcacagattttcgtactatttagtgttgggagtgccttagggaccatcaacaacaggcccctccttttatccatgagactactgaggccttggaggttatttgtccatccatggcgggtgcacactagaggttatctggttagtagcccaactaagattagaacccaggaattttgatttaatctcaaatgacctcttttatttctgcatccgggaaggagaagaggaaagtaaacgggaaattcatgttatctatggaaaagttatcagtttgatgtttattaaatgatttgtttcaggagattgtttacaacttttatcttcctagacaataattttctgtaagagtaaagtcatggtcattaaggtagtcatattaatgtattcagtaagctgtgtggtgtggataattttggttttgacaataattatacttttattgaacacttcctgtgtgacagatcatttatgttcttttctgctgaaaattcagtatgggctgggatcacatttattttgtagattattctgtctgcaattcccaaatatagtgggcagcacatggtaaacactttgtaaataattgtaacatgttgtagttttgttatagcgttatgctttgtaaaattaaaagtagctatatccttctatgatccagaaatttcacttctggttatataaatcaaagaaatcctcatatggttctataagagaacatgtataagcatgttcatcacagcattgttggtgatagctgggaattggagacaatctgaacacacatctgtattagtcaaggttctccagagaaacagaaccaatatatataaagagatttattaccaggaattggctcatgcacttatggagcctggaaaatctgaagtctgtggggtgcgctggcaggttggagaccaggaaagggccgatgctgtagtttcaagtccaaaggctgtcaggccgaagacctgggaaagagtgaatgttgtagttcaagtctgaaggccatctgctggagtaattccctcttgcgctggggaggtcagccttttgttctattcaggcctttaactgattagatgaggaccacccacattatggagggcaatctttattcagaacctacccatttacattttaatctcatcctaaagcactctcatagaaatgtcaagaataatgtttgaccacatatctgggcccagccaagttgatgcataaaactaaccattgcaccatccctgtgaaattatataggtaaaatttaatggctgctgactcgggggtactgtatcaaataaacttccaaagaagaaagagatggtatgctcagaagagttcaactgaaaagaatttaatgaaggtgctgcttacgatggtaaacaaagttaaggaatcagcagagacaggcacccagggactaggaactaggcttgaagggtaaggggagagaatgatgcaattggaatccagtgagactggagccatagaagagggccatcctgccagaagctgtggccataaaggaatagacctactgccaaatgctcaataaggcagagagggagggataggtgaggggccagggtggtagcctgaaacccgacctctttcttctggccttcagtcttctttgggtgtccctcattggtcaaacacaaccagaagccagtgggcatggggctctgggtgatgtgtctgtagagatcagccttaggggcacagagctgggcaaggaatgactcagtggcctggaaagggcacatgatgaaaggccatcataaatagtatacagcagttagaaatgatggagtagatatgctcaaaaccacatggatgaatctgaaaacgtagtgcttggtgaaaaaggtaacaaatagaaagatctaaaacacaattctagttatgaaaataaaatacatatgcacaaaacaacaatgcacatctgccagactatttgggaacaaaagcatacacatcaaacactgtggaatagctgcatgtggtataggaaagtaatgtggattaaagggaataaatgagaaggagagagaggtctttcatggaccaatgatgataatgtgctatgaacagaggagagtgattaagtcaactccgtgcactaaggatccaactttatgagaaaaaaatatatttataaaaaatatataacatatatatatatatatttggtattgatttttctgttatatggatgaggtaccttatccatctaactcatgctgccagattggaggaatttgaggcctgaggggttcaaggaactagcccagggttatgaaggtagtgggtgatctcttgaggaaatgagacgccatggatattcttgatgtagattcttctcttcagtgacattgtcatgaccccacctcattgagatatttgatccacacaatacagtgatttaaggcctgtgtgaatgtaaattactgctgttcatttttgtgctcctgcctgggaccagggaagaaattctccaaacatcctgctttccgagtttgaggacttactttagaaaagtactaccattggctttatacctatcattagctaaaccttctgtaaatggcatcattttgggagcaaggtaattgtcaggtcaggcctggatagacatatacctcctctgttatctgcaaggttgctttcaatctccttcttttccatctgtctacaggcatctcaatggtttatgttaaccttagaaaatagggcttgggtttagccacaggggatggaagatggccttagccacatggctgtggaagggaaggaggtagggatggccctagtcacactgggcctgtgtaaaagggccaaggagcacttgcccctccaagggcacttgtctctggggctgtacttgccacaaacctaatcctctccattacatagctctgcaggctaagttttcaggagacagcacagacggaaaagctccataaagctgttctgatcctcttagcactttgtgcaaggagcacagataagacttttgattctgggaattactggaagaaaaaatatacctttgtctgaatcactcatgctgccagattggagaaacctgaatcagtttgatgttgttcataacaacaacggtagtaatagtaataatgaaatctgtccccaccatttgtttacctactctgtaggaggtacagtgcttgaaggttggcatccgtgatctcattccattttcacacaaccttgcattttgctggcagagagaccaaagtcaaacaggttaagcaacttagccaagaatagagccagaaaatgacccagtctaacagcctcctcagctcctgccctgtcctcacagtggttccatcccaaatgcagtagccaagtctgtcctgagacagggtggcattggggtggaagcccaggaaggctgaagcttcccaggtggggctaagtggaatgtccccaaggcccagattggtgcccattttaagggcagggtttccttgatgaggttgttctctcttcttgcctggagagaaagcctatgttatcttatgaaatatcccctcaggtaagaagggagtgcattctattatatatcaggacatggatcctgccagactgcagtgagtcaaggctgcttcatgatgtcttgagagctggtgtcctgggatcctttggctgggctggaaggttcagctggtccacatgggtaggaggatgtgttgggaaggcaggagaagaaggatggcctggcctagcggtttaagtttgctcctagagagcagaagtcctggcatagaaaaggggattcctgggctgtcacagtgagtccatattagtttctcttactctgatactcttcaaagtccatccaactggagtcacatactcccttcttctttttgcaagcagtgctcaaaagtgaatcaagcccactcagcccaatttgttgttaatgcttgttgctctcgcttgcctccctttttgttttctctttttaaggctgttttgtcctagtaacaaataatataaaaaataaaaataaaataaataataaaatactactactaataattggcaacaagcaccattctagttgctttatgtagatgatctcatttgatcctctgcagaaccttacaaattattatccccaattggcagatgaagaaactgaagcttggaaaggttaagaaacgagttcaaggtcgcccagctagaacattgaggagcagagaacagaatgctattttgtgttccttcaaagcctggcttactctctacttgaccacattgcctataaaatggggatggtaataacagttgccctgcttgctttgcaagcctgcggtgaggatcaaataagacagtaattgggaaagcactttgaaaattgcaaagcgctatgtaaatatatggtattattctaatgtatcacgggcctacaaaaacactgctcaaacatttcatttaagagaagacacaccaaaccattattcaataagataacaccatatgtgatcctttcatcattccaagaatgtttatcaagtccacaaaaccaaagccattagtaaggttttgttttctgggtaggctcagcaaacttggagcaagctcaagtggtctttaaatagtcaagttaaattgaagagaccgcattaagtgtcaaataattaaatgcccttacagactctgggagtttaagatatatgctttcaatacattagaatattcctaagagtagctttcaaggagttgaatgggaatccctttggtactaaagggagcggtaataataataacagaaaataatagcagtaattttaaccagtggagtagtgtgaagaacactggctatccaaccagactcctggtctactagatatataacctggaaaataatttaatctgtctgtgctttagttttcttgttggtaaaatgggagtagtaatagcaccgaccttgtaaaggctgttgtgatgattaaatgagcaattggaactgcacctgccatatatagtatgtactctgtaaatgttacctcatgctattattatgctttcttaagcacacaaaatatttgcaaacaacataagaataaaatggtaaagaaactgacttcagctgtaataactaaggtcctccaatgtgccaggtatgatgctccatactttatatacattatctctttaatcatcataacaactctcagggagagattttctcactctccccctccgcattttacagatatggaaacggaagtccggaagactcagtgtgatcatctgaattgctctttaagacttttttattctttactactttcccaagttgccaaagcctggcagctagcagcaagtcctctgccctggatctgattggtcttgagaatggggaggactgtctagtgtttcagctgtgcctatgctgctgagagatgggcaataggggaagcgggacccctctagaagtgatggctgagaaacttcaggctggactttccacaccttttcagggttctggagtgagtcagtgttactcagcccacttagggctattcttgaagctgctttgaaccagattttaaggttttagaaacattcggtaaggcaggagtgtggctggtaccctgcaatccctccagaatggtctggtttctaactgggttgatttaggatgacatcacatcagttcacagcattaaaactgcctttagcgcctcattgtccaaaaggacaatgtcctcattctttaatattgcggttgagtggagtaagttttgacttcagaacctaacaggcacagatctgaatcttggctctgtcatcaatgagctgaatgattttgagataaggtaaatttctcagagccacagtttccttatctactaaataatgcttccttgccagatcaaataagatgcaaagggacgcaaagtaccccacacctggtgtggcttacagtgagtacttactaaatgttacttcccttcctttctcttagcaaggcacacataaccctttctaaacacacctcgacctgtttattaacatactgtactttttttctatgtgcctgatagttcatgaagaccaagttgaaacatgcctttcctagttttgccacagaaatgagataatctatgtggaattacctagcttattgcctgggacaaaatgggctctaaataaggaagaatgagaaggtggctgaatggtaggagctaggaatgttggtaatattttctcctgaagcgtacccagacttctctgggaaacttgaatttaagaaagcttataagggagactgtgcagtggaaggggtctggtcaaggagaaacagagcactggtgcctgtatactgccctcccccaataaaatatttgtctcctctaccccacaagccagaccacagccattcacatttaaagcttgtggtttgtccatccttgggagggtgccacgtggaataggattatattaagtgcatagtgatggctttgtggctcaggcagggaaatgtccctggctaattgcacattagatactagtcctgtaaatgttattaggctgtgcaagctagctgctactattaactttatgttgaccttctttgtaccaaacacaagctctcaaaagagttctttgcagagtgccatttaagggctcgtgcagcctttagaagttgatttggggatgcctgggaatgcagtctcctggaattgcatttaggatcctgactcaatatgtattttcattctggtgtttcttttggtcctattccatgcgttggatagctgaacatggacagatatacaatatgaagtctctttggtttccatagtaacacattatttatctggcattgtcagctcattaactgttccacccaagtgaattttccaactaatcgaagcatttctcattaaatgccaaacagtttgttgtttaatggaaatctttcctaatggattacccacgcacctctgtcttccgaaggagggctgtcttttcacaatactgcttggacttcattgtgagtttttggatggtgctgtcatatatattactacatacccagggtgtgttgaactctggactaattgctctaagctgttaaattttttgagtccctgggtctccgcactttctcctgagtagttcccagtttatctgcctccatctcctttcctgatctcaatttgttgtgtctagtcaactccagactaggaaatctgataacgaagcttgtgaaaagtacgtataaacagcttctgagtgaaaacctcttgagcttttctaaggagtaagagcttcaatgcaacaaactgggctgattctccacaacagaaagcattctgcctcagacattgttttgtcagatatttgtttacctatcctgccaaatttgagtttcaggaacctaatccaaatgttaattcgaatttccaaatcaccaccgattgcccatccctaatcaaaaaattctaaatgctccaaaacctaaaacatttgagcaccaacatgatgccacaggtggaaaattccacacctgacctcatgtgatgggttggagtcaaaactttgtttcatacacaaaattattaaaaatataggggccaggcatggtggttcacacatgtatgtaatcccagcactttgggaggctgaggcaggagaatcacttgagtccaggagtttgagaccactctgggcaacacagaaagaccctgtctctttaaaaaataataattattattattttatatatatataaagtaagattacctttatactatgtgtataatgtgtgtataaaaaataaattttgtgtttagatttaggtcccatccctaagatatctcattgtttgtatgcaaatattctaaaatctgaaaaaatccaaaatctaaaacacttctaattgcaagatttttggataagggatactcaacctggactatccaagtgctggctttaagtgggatgttacaaggccttcagaaaggtctgttcaatcatttcttgttcactgccaggcactgagcaaagcactggccacctagatagacatagtccttgcttttgggatactgaaagtctagatggaaaaaaacttagaaatatgcagataaacttgaaaaatggtatagaggggtgcatgactaggttctgcatagcacagagaagggaatgatgtctgcttagaagaatcaaagaccataagcaagaggagataatttgccctccctctacctcccttttaaaaattcatttatgtctttctgtatttctcttgttcctatagtcaataaacacttattcaatacaaactatattcctttcactgagattgcagtagcatataaagcagatataattcctgttctcattttgacataaaggatgaatagaaagaaagggaagaggaatgaaaatgggcatcccaagaaagagaatcacggatcgaaagggcaggtgtgtttggaatggtgagctgtcatttagcatggctggaattatgggaaaggaggttgtaaagcatgctctgctgaggacttcaaactttattatatgtgcaggagatgcccagcaaaggttctaacccaggagttcttagaaaagtgtcaccaggctgggcgtggtggctcacgcctgtaatcccaacactttgggaggtggaggtgagaggatcccttgagcccaggaattcaagatcagtctagtcaacatggtggagactctctctacacagaaaatttttttttaattagccagacttggtggtgtgtacctgtggtcccaattactctgaaggctaaggcaggaggatcacttgagcccaggaggtcatggcggcaacaagccatatttgactcactccagcctgggtgacagagtgagaccctgtctcaaaaaaaaaaaagaaaaaaggaaagaaaagaagtgtgaccatatgatgggggattgtggcatgggaggtgggcagcagcagagaaccaaacccacaacatctaataaatgacatgtaattttcaacttcaactttaggtcttaaattttgggttttttgcctcaattacccagaatccatcaatagcttttctgttgtttctgcctctgctcttttcccttgaatgctgtcacacagatccaagcaattagagcctacagaaacaagtagaggctgcctgaccccaggaatgggctaatagatgactcagccatagttttgctgcagaattatgtcagtggaatttattaatgcctgaattatattccatgttgtactggttcttaacccacatcatgaggattaaatgagataatgcatgtgaaatcttcatgcctgacccataagcactaaataaacagcaattgtctttaacccgtgcttattccactctgtcacactgcctgccaacttaacgcacttggtcttttttcaaggtatatgggctgtcagcttatcttcactgtactgttagctcctcaattgtgggatctgggaatgttaatctttgtatcatagtgacttttaagttagattatttaaacatgtcattctaatcataatgcagagacacatgcatgctttcagagagcagcagaaattcagttttaatttatcattgcattgaagctggaagaaaacctgagggtattgttctcagaagttttaacgagaacaacattctctttgcattatcaatgttcctcagtcgccacttggctggagcaactacctctggcttcagttagctatttacattcctctatttttatataaattgtgctatattagcatatatttcacactgtgacctagtgtttcccagatcctttaagccaggctatttgtacattagtcaacgtcaatggaagtaaaatagcaaattgagtacagactgtagccctgctgcattgcccactctgtcatgctgaaatggattccttattctaagaagatttgctgtgaaatacagtctatttacattaagaagacctctgtatatttaaggcataattgtttcagggccttcattaattcttgaactgcaagacctagattttcttttcttgtatcttttctataacaatggaagtcaggagtttccaaaaaaaataacaaattgttcctcattaaaatggaactgaaaatggttttctggaaatgtgctttacaaacaatgagagaatctgattgtaaatcaactccaggacccagctgtctcagggtccaggctgggaagctccaggataaaaggtagtctgtatttttatggaaaaataaaacaattttttacttccgtaattgatgaagtgcttatcttgtcatacaattttaaagtcggaagagatctcagaattcatttaatccagccccttcttggaaaataacttcttccttggtatctctgacatatggacatctagtctcttctagaatacttttagccatgggcaactcactcctttttcagaaaaaattgtggttaaacatatgtaacataaaattactttttaaccattttaggtgtgcagttcagctgcgttaagtacatttcacattgttgtgtaatcattaccaccatccaatgccagaaatttttcatctcctccaactagaactctgacccattaaacactaactctcgattccaccccaccctgcctctgcctcctggcaaccatcattctactttctgtccctatgattttgactagtctatgtgccacatttaagtggaatcatatagtatttgtcctttgtgactggcctatttcagttatcataattgtcaagattcatccatgttagagcatgtgctagaattttcttcctttttaaggctgaataatattacattgtatgcacatgcacattttgtttatccattcatctgtcaatatacatttgggttgcttctaccttttggttgttataaatgctgccatgagtatgggtgtgcatatttgagtccctactttcaattcttttgtgtatatattcccaaaagcaattccagaagtggaattcctagattacatggaaattttatttttaattttttgtggaactgccatattgttttccacagtggctgtaccattttacattcctacgagcagtgcataagcattccagtttctccacatttttgccaacacttgtcattttctgtttttgtttttttttttttttaaactctttagcgttgtaatggcatggactttggctttgaaacctggctcagccacatactaggtgtgggaatttgaacaaattatttattctctctgagcctgaggggtttttttggaaaatgtgggtaatggataatattaattttataaaattatgaggatgaaatgagaaaattcatgtaaaaatacttagttcaccatctgaaaataggaggctatcagtgaatatttgctctcgtttttttcgtggtcattgattagtccattaaatttagggctactctgatgttagactgacttcttcattttgaattaaaacctactttggtgtaactcctgtagcttgtgtaacagttgcctttaattcatcattcctgactctgctctttacaatgtcacatgataaataatatccccctcccacatgtcacctgtctgatatttgaaggcagctatcaagtattcactagtcttctcttgctttggtcgaacactctggtttccttcaactgtttcttaaatgatgtggtttctagatctctcatcatgtatatcagtcaattctggactacagtctagtagaataggataattggaaatcacaccatctctccccttattttggctttcctgccaaactgtgatgtccacatgaaagaacagatgcatggatatgcgtctctcaatcagttcaacacattgagcccttggccatggcttccatctcttactcaacctctccccttcctcattgctcagagtgcttgatgtctaaagcacttgctttcattgagtttaggatcaattataatttcaaattttctccattttgttttttctctcctgtcagctccttaagagagaccaaggactacctgttcccgtgtaccttcctcatggtcccactagcacccagcaggcatgaaggctgtacttttgaaataaaattcagtttcgctctgagacatggagctgtgtcttctgacacaatcacaaaaaccacagagggcattggctagagtttgagccttttctgttgctgaagggaatacctaaagacttgcccaggaagagaaggctagagtgggagagtattttggctggaactccaaggagcactttgaacgtgggtcttcagacatgaaagtgtagggagggcttcactccaccccaccctgtcctgtaattcctggactcttcaatgccaagcgaaattatcagtttctaaatttgcccttaggagggtgaatagagtgccttagaaataccagtgctgtttctgaaagttcccaagcagttgaaagaattctggatttacatgcctaactcatctaaatgtcttttctttatgagctcgttgacatccaagaagacttttcagttttattatgaacctttttacctttaaaaacaaaaatcccaaacctctattcctgagaagggaagttgtaattttgtcaaagataaaatatttgaatggtgctctgtcccagctcctccactgtgtgtttgaaaacctagttcctcatgtattatcctcccaaacacatgttatgtgtttacattaaaaaaaggtaaaagccagattctcttcctttctttaaaaatagaacaaaaacaaaacaaaaagtgaaggagagggaggagtaactcatttcttggcattttaatagagtacccagaatcctcctaatataaggcactattatagttgaaaggcatattaaaactatgtataaatgaaaaactctgtcttttaaaaattgtttatttattagactggagtgcaatggtgcaataacagctcactataaccttgaactcctgggttcaagtgatcctcctgcctcaggctcctgaatagcttggaccacaggtgcatgacaccatgccagggttttttgtttgtttgttttttgttttgttttgttttgttttgcttttttgtagagtcagggtctcactatgctatctaagctggtcttgaactcctggccccaaaagatccttctgacttggcctcccaaagtgctagaattatagactgagccaccgtgcccagcctaaaagccctatctttagtaaaggactggtagatttacttatgatggacatacatgagctttatggcatgagttttgtgacttctacattaaccactcagaacactgacaagctgtaaaaatattatagatcacagccatttttcagatatgtgcagttgccagattgctgatatgcagatcttattttgcaaagtcaaggcaaagtggtcccttcttagtttgcctgtttgccatatatgcatttggaatgatgccacactgcctggtgagaccccaacaaaggcattacttggtggcgtagaaaaataaccaatttccaaggaaagacagaaagaggcaggtcttcttcacccatatgggcctgttgtcttccaggtctaatttgggctatgtttggtttatctgtgtggtagacttcacttttcttacattaattatttgtgatctgccacctggggaagttggaaaacatcagaagttaatgctgttgggtttctttaaggagaagaaagaaaggcctagaggtgtctttgcaacaaagaaggtagctattaacctttaagggtgttgtagaagccagtataacatcactaatgtggttgtcatgaaatgcaatgacccttctctcttctgtcacctgtctcgcttgactaactctaccactcacatttcatgattcagtgtggagaacataatgtgacgaataggaaaggagaatgtaaacacctgtagtaatgtctgtctagtgtgaccaaaatccctgaccttatattttaacattgtaacttttgggaagaatttcttttgatacatgtttttattttatgaacttaaaaaaacccgacaacccttgtatatgtcagagtctgttagtactgtgtgatacattaaatagcagagaatggaacaaatatctgtggaataggttaattattattattattattatatttatttatttatttattttttgagatggagtcttgctctgtcgccaggctggtggagtgcagtggtgcaatctcggctcactgcaacttccgactccctggttcaagcgattctcctgcctcagcctcccgagtagctgggattacaggcacacaccaccacgcccagttaatttttgtatttttggtagggatgaggtttcaccatgttggccaggatggtcttgaactcctgacctcatgatccacccgccttggcctctcaaagtgctgggattacaggcgtgagccaccgtgtcaggccaggttaattatttaatgcagacttctgctcagggtatttgtgcttaaagagatggactgtatagacacatcctagtaaaaggcttgagttactggtagtttaaacagaagccactggtgaacaggggaaagaactattggttcaagtttaatttggcatctttttagcagtgacatttggcacatcaccctctaatccttggttttgtcaccaccaaaatgaagataataacacatcagcaaatgtttgtgaaaatgtataaatgtgctttgcaaactctcatggatagatagcatgttattagtatgattgctctgctaatgagtgtagactttgctgaagttctcctcctcctcttcttcctgcctcttcttcctgctcattactgtcacaactaccccttatgaatttgtgagccattagggtagattctgcatctcttaacccatgtctttttctgcctgccagtcagagtcagcaaatattagatacctaataagtgtccaacacgaaggatttaaagatcagtactcaaaatatacaaatatggacatgcagcgatacctaagtgactgtttacagttccccaaattagtatggctccctggggcagaaaaatcttttgtctacatttctaatgtctactcatccttaaaactcaactcaaaagtcagtatcccttggcaacctgagatgttcatttctgttgccctcctactcgctcttatgaggtgctctttctatggagtcccgtaaaactccgggcatacctcagaagaaacacttgtcatttgacagaggaatctttgagaattgaactctttttaataaaaattctcccattttgcacatggtatagaattttaagagtgcaaaaagatgtacagtaaaacatcctgcttgcccctgacttgaaaccaccagttccccttctctggtgtagacactgttcccaattttggggcatctcttttatagatattttataaagatgtatatttatacatgtaagagtatgcatacataatgcatattatacattccatatgtatctgtgtataagaacacacaagcacatttttgtttttgcataaattatattgttgtatacacactatgagtactttgcttttatttttaaacctaatgatttattttggtgattgttccaaatacagtgcatacagtttccttgtttttttataacagctgcattgtatttcattgtgaattttggatagccataatttatttaggtagtctgctattgctggacaagtaggttgtttccaatcattttatattatagacaatactgccatgaaaatgttgtaacaatatcatttcatgtatgtttgagggcatctgtcagattaaattcctagaagtggaattgatgtacacacagttattaacattttaaactttcatagatattgtcaagttgtaccaatttatgctgcttttgatataagggttcctgattgttcatatccctttcagtatagtgagttatcaaactcttcatatttccaatctgattggggagaaataacatctcattgaagttttatataacattttttatattatcagtcaggttatcatgtttgatatgtttaaagaccacttacatttccttatctgtaaattgtgcactcatatcctttgtccacttatctatttcctccttggattttttttctttctgattggtaggaaattttgcttactatattgtagccctttgccttttgagctgcaataattttgtctccctagtttgacatatgtcttttgatattaataacccatttatgcctaagtagcaattttttgaatttttgcaatcagacctcggcggggaccttgagcagtaggatatcaataactctcacgtgcttagccttccaataatggaacactagtcataaatggttaatacggtcaaatttattacctttttaaaggcttatagatttttgtgtcaaactttgaaaaggtcttcacactacaaggaccttgaagcagcaggtcagaaaaaatgcagacaatggagaaggcttgtggggaaaggcctgaagaagagggtcctcctagtggaatagctcacagtgtgggacggtgacatgaacttaagggagaggtagtaaagtgaaactcattgcattgcttctctctcccaagtgcttccaccagccacagcaaattcccccaaatacctccgtcatccctgactgaaaatggatgaccacattccatatgggaaaagtatacaccacctctgagcatcctcttatcagccagagatcaagttgcccatctcagaaggagatacacaggatcagacaggctgcctcatccatcaagtgcacagtagctttggtcgttcctgttcattgcagttgactggaaaggcctcctgaaatgctgatagctgtgggaggagggagagccctccctttccacatatgggcagatctttggcaaatccaaaggtggtcttgcatttttgtgaaagttcctatgcaggcagcgacaaacagctaggttgtttataaaagctgcaggtggaatgccatttcattttggatgtagatattgacacccggcaaccaagtcaaactgtttccatcagatgtaaaagccagaacagtcttggcaggttgatggctaatgaaaaggagttgcaaaattaattacatggaaaattatttttttttctaataagataatgaaaaaatacatactggattagggaatgacaaactcaccaagcttaaatagcagttgttattagctgaactctgtacttttggatgtgagaatatcattcttcccggatcattgtttgaaagagacctcctgtacttttgcctctctcaaatttgattaaatgagctgccaacacaagaccctgtcagactaagatgactctaataggcagttctccgtagcgcttcacaacaatgaaagtaagttcctccctccatttgtcttttgccttcagtttctcaaacttatttctgaatgcacaaggatttttgaaatctggtcagcttatttagtggaatgattatgggctttgcaatcagaaagactggatttcaaatcttggctttgtcaatctatggctttagattagttcttaacctcattgagccttagagttctcatctgtaaatggacatgtattacccacaaataattctatataacaaattaccccaaaatatagtgtcttaaaacaatgagcatttatttagctgaagaataaatgagctattatttattattatagctattatcaaaaaagattggttaggcggttctctgatctggactgagccaaggtgatctcggcacatgctattagccaaagcaagtctagattcaatggtacagaaatacactccacctcttcattggaggagatacaaaaagatgtggatacagggaggaataaattgtgggcattttatagtctactacactaccttataggaataaatgtgataatatagggagcatgcagctatcatatcacctatgcattcagaaaacgtctattgactacctactatgagtttggtgcaacattgatactgtgagatactgtgagtaacgtagaagaaagtaaaatctcatccccagcctcaagaagcatacaatcttattaaaaagatgtacccccaaagaaactgtagatcaccttacaaagtgcaaagtctcttaagagtggaacagataaaatactgtggggtttcagaagagggagaaattaaactaaaaggctctgggaagagattctcgtcccaacttatgctctgctaatgttttcctcgatttaactttgattattgatctccccaggctatcagtaatgacatggtgcaggaaacccagtccagacaggcgaaacattttaaactggtgcaatttcaggtgaattaagtatttgaacattgccagccatccagattctacacgcccaggctaatatggctggagcaaaaccatcttactgtcttgcaggatgatagtaatcctcttaaatttatctctctgattaagataatttccactaatccaggagtccctcaatcccatgaacttaaacacttgatttccagggacagccagaaggtataaatcacacttttaatatatttttctgaaaatagttctttttttcccccctttcacgcctcacagtttggagctttgaaataattgaattaacagtgcgctagagggggttagacaaaaacaaaaactgggaaagggactttaccagcagtgcagtagagagcctgagtggagccaggattgggtgaggagagatcatggctatgttctggcagttggtgacatgtcaggggaccttaggcaagttctctgcccgagtctgggtttcttcaagtccaaccagggtatgattatctcaggccttgatcctttgcatgtggagtcatgagctaatgtctgttctgtgtacggactttcttgaaaggaaaagtgctacctaaatacaaggtacttgtattactgtaaggtgcttggaatcttaatagctttctcaactgcagccaaagtgggcttctctttgtaaatgctttaagtggctgagaatcaaggctgaaaaggggtttgtttttctccccatctatgcctagagtaggatggctgcacgtttttagggcttgcccaatttgcccatttataatggagggctccacagacatcacagccattgaaatcctatgtaaaatagagaaaggctaagacaatactacacactgctttttgcaggaaaataattttctatgtaaaagtatagttgtctaattcagtggtcaaccaattaagagaaccttcaagttagacctaaatatttggctttgaaagacgttcaagaggtaccagttttgttgttggttaatattcattgagctgtctcaatgttgaggttgctgcccacactgaaattttatgacaaaagcaaaagtaacattttaattggctaactccctttcccctagactcttaaattacattaaagttctcagttcatttaaagctttttgtgtttttcagttatttttacagacatattatctgggtttccttaccctggtggtttgtagaggatcggtgctaggctgcaggttatgttaagactcacctagggagattcaatagtttagagacaggggtcgaaaaatcattattttttttaacatgctccccagctgagtttgggaatcattacattaaacactcttcaggctgtatctatggttagtttctgtatctatgattagtgttttttttttttaaaagtctttacccaattgtgagaactgctacttcgctaaaagtttaccatctgctggacattgaagtcatctccaaatattatcccagttaagcctcataacagtcctgcaaggtcattactattatgcccattttatgaatgaggaactgagtcttagaggtatgaagtaattttaagctggtgtgtaacagagctgggatttgtgtttgaacaacacaaagctgacacctttcatccttgtgctgaactgcctcccatctaacctattccaggatcatttagtagtcaggcaggacacaaagaaagcatgagacatgaccctccctctcaagaagtttactgtctgagaagaatgaaaggaagaacacatactcactggtggccaaaggaacataaaattaagtggaaaattgtaaagtagaaaattagggtaatttaaggttttttttttttgtcttttcaatagtaaactgagtatcattgaattagggggtttattttctttcctattaaattacatggttgttttgctgtgatttgaacatagtgtgaatcagaagcatccttctgtttgaggtcccaacatgaaaaatatttttattgatatcagtgttataatctttcaaggagatgcaatttgtgcatcaacatattctgttttacatattctattttgccattggtctctaaacacacaggttggagcagaaataatgtaacctgtacctagtaccatgttgaatggacaattattttatctttttcaggggctaagtgtaaactagaaagacaaaaggaactgaaagtttagaacgtcttagacaagtacattaggctaaccctccattcccagcagatatttatgttgctagggaaataaaagccagaaagactcagttctgattgaagaatcaatttaggaggttgatatggtttagctctgtgtccccacccaaatctcatcttgaattgtactctcataatttccatgtgttgagggacccagtgggagataattgaatcgtggggacggtttcccctgtactgttcttgtggtagtgactaagtctcacaagagctgatggttttataagggatttccacttttgcttctctctcatcctctcttgccaacgccatactgtaagaagtacctttcgccttcctccatgattgcgaggcctctccagccacgtggaattgtgagtccattaaacctgtttttcttcccagtctcgggtatgtctttatcagcagcatgaaaacagactaatacagaaatacagacgtatacatggccaaggccaaatcactaaaactgagggaggcattctctgtttccaatagaaggctcctttgagtatccaagtttgcaggcaaagacagatacgtgattatgacaggtgaagatgtacccactgtagaccatcttttctatgaagatcggagtctttcttggggaggtgctatcctcaccaggtctcagctcactgtttagttgtggtggaaaattctgttttattcaaaggaagaaattagattatccaggattccatgtctatctaaatatctggtttgccataagccacataagcctcatcaccaaaatctttggtcaggacaagatcctccagaactgtgctaagccctttgtccttcccaggcccctattgcagcatttatcatattatactttaattttttgtttgcttctctgtgttcctaccagaaaatgagctccatgaagtaaagaactgtctcaattttgttcaccattatatcctagcacctggctagcacttagctagtctggaacagaataggtgctcaataaatatttgttagatggatggatggatggataaatcaatgaacaaacaaatgaatttaatatcattaaactccaaatgaacataaggagttgtgtagctccttgtggcaatatagttttctaaactgtctgctaatatactatggctttaggaaacacccagtataacttcattcccattgtgtataggacttaaccaagacttcacttgtttttaaagagtcaagaacaaactctcagtctgtcatggaattgcagctgtgaaagcatcttccttgtgtctcttgtttcttttgagtggcatgtgactttgaattggccagagacaattagtaggtaatagatttttattataaaatggattataaaatatgaaatgaaaatgtacgtgggccatacaaaggggaaaatgaaatggcaaactccataagacaaagacagatgacacagaaagatgagtaagaagaaaaaattgcctggaggcactttttgggggaagcatgtttaaggaagggcagtcaagtggaaataggaaaaaaagagtaaagtttgttgatgtcattggaaacccgagatgtccacagctactgaaaggaaatgaaatggaacctctgtagggagctgagaccagtttctgagcgaagcattctgcagcatgcctcctcccttttatactctgtctttgccagcttcttctgaggccagaaataaacaaattattttattgtattaagcatccattgagtctccagtggcaccatggatgaatgagggagtgttaactttgggtccactcatttgaacttctccttggggaaaagcaagatatgaaccattttgaaatttattttaggactttccactgtccctaaggagatcctgcctccttagtaactagttgggatgtttctttcttgtctttaacaaacaaaacaaataacgacaaaaagaactagaaggccctggattggaaaaagttgctatggctgtagtggagtgagaccattactgagttatttgcacttcctccaatgtgccatggtctttctaatacataggtctcctcttaacccagaacaatctttcaaaggaccaccttcctgccctttgggattcctcctccccaaacgggaatatgtattcttcctcagtgatgtcttagaaccctgtgcctacctctgttgtacctctgatcacatatttacctcttatcacatatttacttttagagccatggcttattttaaaatattaaacacatttcccaatgtatttgcttattattgcttcttacatacaactcttccttctaaatgcagtttcctttttacaggaatgaataatttagcacagaagtctatgcatgggttcatgacagctttatttgtaacagccagaaaatggaaaccaccaaatgtttgcagcgaatggttaaacaaaatgtggcatgtccataccatggaatactctacacagcaataaaaacaaacaaacgattgatacatgcaacaaagtagatgaatctcaagggcattatgctgagtaaaagaagccagtttttaaaaggtcacatactaaatgagtctgtttatacaacattcctgaaacaacaaaattatagcaatggagaacagattagtggttgccagtggtcaggaatggttgggaggagggagatgggtaggactgcaaaggggttgcacacaggaaatctttgtggtgacaaaattgttttatcttgactgtggtagtggttactcgaatctacgcttgcaatgaaatggcagaactatatatacatattttaacaatgtcaaattcctggctttgacattataccataattctgtgagctgttaactattgggagaaactgggtgaagggtgcagaatctctctggtctttacacagcttttgatgtcttatggagacgtttccctcaaccccacccaagtcctgaatggactttcaagagtcctagcagcttctctggactgttaggagaagtatttccagcaccttcccacaggtagggcggctctcccaggctctagtaaagactttaggcagggagctcagatttcgctctggcctagggctacatcttggattattaaatgaacattaaaactgcaggccccagtccacagggcccatattcataggcaccttcagcatcggcgtccactttgtgttatcctttttggcaccaagaatttccttttctttccatctcagctatgcatcatatatttccttgtgacattttattcagtactcttcaagtttttagtctcgttgtggtgggggtggtggctaggggacagggaggctgtttttgtcaggtcttattgttaaccccatcacgctgtttataattgcctgtttgtggtcatgtactcctctcccaccagactgtaaggttttagaaggtgttagggaccagttcaacctttttttttttttttttttttgagacggagtctcgctctgtcaccaggctggagtgcagtggcacagtcttggctcgctgcaacctctgactccctggttcaagcgattctcctgcctcagcctcccgagtagctgggattacaggcatgcaccaccacgcccagctaatttttgtattttcagtagagacggggtttcaccatgttggccaggatgatctcgatctcctgaccttgtgatcctagcctcctaaagtgctgggattacaggcgtgagccattgcgcccggcctggttcgagctttttcatccgagttcttacacatagaaagtgctaatacatatgcatatataatgaatgaataagtcaatctctatagttccatggaagagagcccaagtatgatagttttaaagtaatatagttttcaagaatacagtctatttttattcactttaaagatgtgtgtcattgtggtgctttttgtagcatagtttctttaaatacaagaactgcatgtggtctataggttgaatttaatagattttaaaaaaggaacagcatctccaaagaggaaaaaaaaaggcatttaagtgtgattcaagaagtatttcctctcctcaccttgtgctgtgccatcctttggggattttagaattggtgaaacaaacattgatcgttgaggagcttggcctctggtattggttctccagctatgtactgcagagcttagagttccacaggggacctctggggctgaagggggtttaagccagggagcaagtggttatgtctctcagctccttcccccatcccccatgtggcacagttgaagatgctctggctttgccctcagtcttcctggatttgatgatgatccccctccctaccctgacaagctgattgggcagctgccttcattctgcctcaggttcatcaatcataaaatgaagataataaaggtacctaccttatagactgttgacggttgagaagatctctgagcacaagcagagtcttttggactttgacaaaacctaggcaccttttccttccttttttttctttttcttttttttcctgcagatctcaccatataacaatacaaataatagcacaaattttgatatattatgaatttttcttcaacaaagtaatggattcatcacatatataagaattatgctgattacaatgtaattacatggttaaaaagtgatttcgtactgcaatataggtagtgtgactgggtaattgagcaggggtttaaagttgcaggattgtgccatcttctttctttgtgactatattgataacttcatttagagattgcatcagaaatccaaatttgaggtcactgaggactagaagatccttgtagacattgagcatagtactttccagtcctgactatcccatataggatgaagaaaactccaaattttctctctcctcagtaagtcagccgagtccctagtgtggagaggccccctccttcaggaccccagatgtggggcaattgtgagcctagggctagagcatggctcaggttgactgaccttgcactactggggaatgtagcctgcctgtccttttaagttacagcagactcttacttttccaaacaggcgcctttggttgaggtgatttacctggctatgggcgtctccattgaggcactagggagaggaaagaaacagggctaaaagccttcaccaaacaacatctaaagtaacactgaaaaccaacagtctcaaagccatcagcatctttgactgttttcccgccaccctccaaatgatcacaagtggaggccttcttttaccataggaagaaagtgtgccccttctatgtgactgaccctggctgcttggaaattccttgagtgtctctcaaagctcggcctctgagaatacataccacatcttatggctatacacggcagaacatgcagctcagtgagaagtcagcatgtatttccttttgagccacctctaaagtctggctctatcttagaacttctgtgattttggcgaagccacttccctaccaggggcctcacttgcttcctctgaaaaatgaggagattgtatgacataatgttttaaacaattgtttaaaacattggggcattttccacagtacctgtaaacacaacaatatataaaatagataaaagtagagttgttccttttgaaggagggtctagagcctgtactcttgtcctctggaaccccaaatcctcttatgttcctctataaatagctccaaaaaatcccatggatccaaagaatataatttgataaatatgtcttgggccttgagggcccacccagttataacattctaggactcagtgagtggtcaagaaaggcagtggggtagccacttgcttctcttgcattcagcctttgcagctactgggctggccgctggtcttgtgagtatgcgcatgcctgtgtaacctcacgcatcactgaatcggggatacaggatgtggcatggctgggagcttcttggaagggcctccacatcctgtgaatgttgggtctttacctgccaactgctgagatgaaccagtaatcctttcggagagcacaggcttttatcaatgaggaggattcaaggcttactttttccttccttccaaataacactcccactgttgaggcttaaataccaaaaccttatggtttgcagaatcagtgccaaaaagtcaatcctccgagaaactgcaaagataatagcccctattgatcaaatcgggaggagaatagcttttgaggtttgccctcctaaaagaggtcgagaaagataagggttggagttttctaaaacatgcttggtttgctcaaattggataaaaccatataaaaacacttatgttcttagagaactggtgaccaattcaggaaaacctcacaaaatgaaaagactggcttggattagtgaggcatgtgaaatgcagtgtctttctaagagcatggtaaatgtgttatttcaaatacagacagtgacttagtagctaaccaagtacatccatgcagaggatggccactgtctgccttactagacaaaggagaggtatgaaagcccttgagtctctatgctggacactgtacaggagtcttttggtccattagttaatcattacctcagtcctttgctgctcccattttatggatgagaaaatagaagttaaatgatgttcagtaactttctcatgatcacaaaattaataagtgtcagatagtagtgttaaaatctggtgtgtatttccattaaatagtctactgtcttctaaatggcacatacacatttgctattaccataatgcttttggtgaagagaggctgccaggctggtggtaaatatacctggaaatgtctcatgcttttgccagtggtgaggcgaataggaatccatcagtggagatcctacagggtcaaaacttgtggccgtgtctctctctgaagccactggtggccatggaattgatggagttcagctgagatgtgcttgatttttctcacttaaacttcagttttcctttcagtgaagaaaaaaagcttattaaacatcactttgtgaggggagattattaatattcaactttctacataaaataatcagcctttattttaaaaaaatatggccttggaagatattatttttcagggaagttattcatattttaaaatattttatctgtttttattatcattttatctgagaagctgaacacgtggttatctaaaggaatggatcttgaagttgagaacaaaactccccagaatcagcacaatcacttaatgagcttgcgaattgaaattatctttgctacagcccaagaactgagtggtaattagtgtccagggacacgtggggaacaatttcagtgttagcagtgccaagaatctattcatttgtcattggtcccaaattatattcaatcagcaattcaactcagcttggaaaaaccaagtgacatatagctaactgtctataaaattaacactgtaaaatgaaactatatttctggctgtgagcagcagtaagatgaagctatgaaaatattgcatgtaaatgctgtcaaggttcattttaatcccaccactttccaacctatgcttccttccctgaaatgccgccttggctgccaaccttctattcccaagctccctgaagtctgggtgtcggggtgtttgatgagccttttcataggtgaaccgcagcagtccatactactgaaaacaagggctgtcattattgaaagagccaaagtgggtggcagcagcatggggctcagactggagttggggttggagtcatatgtggagggccctgaaatgtagacaattagctcttctggggaaagcacctgcacgaaatacccgttccccaaacaagaggttgataacagaagcactgctttccactgtggctttgtagtaagcatttctcctacttgggtaaaattttctttttgttttcatattttggaattaagatccctgccatactgcctatctgacatctggtccccttgaaagagtctatgctatttttggctcaggacgttggaggaaaccagggccactgtaggtggggagggtatgtgtggttcatctacttctttcccacctgcttctaggactaggaaagaggtaagccaaggaggtctgcacaaaccaaacaatccttttgtctctgctgtggcagggagataaactagaagtatgcctttgcaaggtctcagtgagtcaacatcctgttcttgttcaagcttagtcagtgacgatgacatgtggccatttggcagacagtcaccatcagtaaatatggaaatacgaaaaatgtgcttatctctgtgaaaaggtgaggccagaggtaaggtgaaaaaaaaaagccaggttttacaggcttgagtactggtcagcatgggctgccagaaggtgtggagtgctagagtcaaagagacctgggtttgaattgcaattcttccacttaataaagttcatcctgcattctatctcagatcaatttttagtggctacctagagcactgtgcttaaaggactctacgacagatcccaggcttaacaggtaaacagagccataattgattaaagatgcctacactggattgaagtaggagggattgacaacttgtatgccttatagctaatgaccctgggtcctctaaggtcctgtccagccctaatattctctagtaatgttctgagtgtgtgtgtgtgtgtgtgtgtgtgtgtgtgtagacatagcctgaggggaggttagtataaccccattacaatatattagtagcgtggattaaattttcaaaaaacaagaacaacaaccaagattatttgtatattacagtctattattaaagagttttaacagcccgtaagtacttctaacagtccataagtacttcatagtgtattatgtcctttagattattgatttgtatgtttgctttgattcatgatggctttgaaaattatattttaagttatttaccacaaatgactctctatattcaaatacttagctttcatttgtcttgacctaaaattccaatgtagagaaacgaatttctctattcacagaaatggtaacaattccaaacacgaccagtgaaattagttacaggagcaatgttgttcttccttaggaaggctattaaatttattagtctaagactggtctttcaacaagaaaaggagtttatgtttgattatgtgtggtcatttctgcagatttgttttcttgttaatgtagtattttaggggcgaggtgtattttgcccttgttcttttttttttttttttgcaatttccatttttattttagattcagagggtacatgtacaggcttgttgtgagagtatattgcatgatcctgaggtttgggcttccattgatcccatcacccagatagtgaacatactacccaataggtagtttttcaacccttgccccactccctctatccttttgtaattccagtgtctattgctcctatccatggtacctatgattttactcccacttataagtgagaacacatgatatttggttttctgcttctctgttaattcacttaggctaatggcctccatctgcatccatgttgctacaaaggacatgatttcattatttttatggctacatagtattccatggtatatatgtaccacattctctttatccagtcctctgttgatgggcacctaggttgattccatgtcttcgctattatgaatagtgctgtgatgaacatatgatgcaggtgtctttttggtagaataatttattttctttggggtatataccttgtaatgtgattgctgggttgaatggtaggtctatttttagctctttgagaaatctcccaactgttttccacagtggtggaactaatttacattcccccaacagtgtattagcattccgttttctctgcatccttgccagcatctgttattttttgactttttttgttttttttgagatggagtctcgctatgtcagccaggctggatttcagtggcaccatttcagctcactgcaacctccgcctcccaggttcaagcgattctcctgcctcagcctcctgagtagctgggattacaggtgcatgccaccaggcagggctaatttttgtatttttagtagagacggggtttcatcatgttggtcaggctggtctcgaactcctgaccttgtgatccacctgcctcggcctcccaaagtgctggtattacaggtgtgagccactgtgcccagcgtgactttttaatgatagccattctgactagtatgagatggcatctcattgtggttttgatttgcatttctctggtggtaagtgatgttgagagggttaatgtaatattttacattttaattttcaagccagtgttttgaagtaaaaatcttcaaatctggccaatagattgttcatttggatggcatctaaaatgcaggcgcctctactggcatctagagccaccattccagtctaataagctatgggattgccgtggtctctctccaaaggcaggccctttggaaatctcctctaatgcttctaacagcctataaattactatatttaatattgcccttgtctttctcccttcccttctttttcttttcagaaacagagctgtcagtcagtgctgaattagtgcctacctcatcatggaacatctcaagtgaactcaacaaaggtacacagtgggggcacacaggggaggcgaggaaagaggtgtggaactgtttttaatcctggcatgaccttctttgaaatcaactgtttttcagatcactgcaaggaggtgggggccaaaataaatccccagcttactttgtgatcatttaacattgaattacttgggattctattatttctggagagtttctttccccccctcgttcctttttcttcttcctctaaaatgttccacatggtaaaaatgcttcaagatgtgaaatagggtcatttctgacctttctgacactacatctagtggatcttatttaggggatttgattcagcccaagccaggattcatcagagctgtttgctcggtgacctttcacgatgagcatttgatgtgcttgcagggttcaggaccgagtatctggaatgtttgtaattgcctgtgcataaggatggcagcttcctttgtgcacgtggggaacaggtttctgctaggagattgttgtttagcattaattaagccccgccatatgttaagcattgggtattttataaagaccctatgtcctggagtggtacatcaggacacattcaaaacctctgcagtctggctcaatctacctttctagccttagttatctttattcccctttatgcatttccagccaaatttcgatttcttcttatacatcctgtgcttttctgcctctctgctctcaccttttcacctggattgccttctcttctttgccaatactcattctcccccttttgcaaggcaacaaattacttctccctcaagaccaagcataaaatttacattatccagtcttgtctaatccctccagctggaagtggcctttccctctttgaaactcccatagctctctttcttctctgttcttctcttcacattttctatatgatgttatggtgatttatatacttatctcacccttaagcttagaagttccttgtaggagggtttctatcttacttttttttttttttggtctccatcacaaaatctagcacaaactcttatttgtaggaaattctcaataaatgtgtgtggaatgatgagtcacatcttacctggtgagaagccatagccatacatatttgtgtgcaaatacattcagcaaacttactgagtttctactttagttcaggcatgattcaaggttctgagattacagtggtaaagggagctcaaaagtcattgtcataaatggtcttttatgattagctctctattgtctactgacatagtttggttgtgtccccacccaaatctcatcttgaattgtagttcccataatccctacgtgttgtgagagggaccaggtggagataattgaatcatgagggtggtttcccccatcctgttctcataataatgagttagttctcatgagatctgatggttttataaggggcttcctccttcgctgggcactcattctctcccctgccgccctgtgaagaggtgccttctgtcatgattgtaactttcctgagacctccccagccatgtagaactgtgagtcaattaaacctctttcctttataaattacccagtcttgggcagttctttatagcagcatgagaacaaactaatacatctactaatacattcactgtaagttgtatttcctctctgagaagagataagtttattttataaaacagcaatgggtgaagttattttgctggttatactttactaggcactttaggatggtggaatgaagtgagatgtcttttcaccttaaatcaaaggacatttagaatattttttctattgccaaatttgacctgacattatttttctattaaatattaaatcaggcactccatgttactcctctccacctccagcatcaaccacaatgcctagaaagcagattttcaacaaatatttatagaatatgtttaatggaaaagaagaaataaaagaccctgaacattaacttagtacctgctctgtgccaggcactgtgctgggtgcttttttgtgaacttattctgcaagttccttatggtgccaacagaaaaattatatcattgcacactgcatgttattgatcagattccagttatggcaatagaaaagcatcaatgtgtgctaagaaaggcagcagagccagcagtctagaacccagcctgccagacttggaatttctaccagaccagcactgtaattagtagtagttgcccattaagaaagtagtggtgtcaatagtatgaacctgctggctgaagggaaggataaaggcaggccccagactcctttatttgttcaacacagacttccagagagtatggatggctttctggaggtacgaggatgcttggcatcatctttctctagaaggtaattagtgtatattctttaatttccattttgaatgagagaggaagatcatttgttgatcaaaaccttatcgattcctactctggtctaggaactctatgaaaattaggatataaagataaaccaggcaaaggcccctgtcctccatgaactcagagactatttggaaagactgatagctaaatgcataatcaaagccttctggtcaatttggtagattgagctttcaagagacacttcttccaatcacagagagatactagtgaaatatacaatgaagaaaataatccattgccaagctggtacacaaagaggtgaaatccctaggttccagaaatgaagaacaagttcaatactagtacaatgatctttgaggaggaattaagcaaaagagtccatgataatttgaaaactatgggtactctctaaggcctagagttttggtatcccatggggataagagttggagccacaggaaacaaactccctgcgttaggatatgaatgaagaatgactggcctaagtatgaaataaggaaaattctgctgaggatgtgatacagaaatctatgaagcaccttgggccattgggatcacccaggagaaatcaaaacctcagcctgtactacatgtgggagtggggttgaggttcttctcaggtattgcacaagccacaaaccaagatggtaacataaaaacttggcctggaattgattaaactaggagacactgacagcagcaaacctaaaaccagctcttaaaaatgtctcaacatcctcatgcatgaaggttttccaccaaagacaaaattttaaaaatgaaaaccacaaaacaacaatggcaaactcctgctgatgttgagcttactttaaaaaattataatgcatacaagggaggggaagaaagccaccattagtaagggttagcagacaaaacacatggaaaagctcataccttagaaactaaacacagtggaccaatttgagagagtatatatgtttaaaacgtttcatggtgaaaaagtagaaaccatggggcaaatgcaagataatatgacaaaaaaggcatatttcaaaataactaaatcaaaattatataattgaagaatagagctatggaaattagaagtttatcaaatggtcttaaagtgatacactcaggtcaagaatagtagtgatctgggagacagatttgagataatacggtggtttagaaaatggacttgagccagggtgactgactaggtttgaatcttgactccactatgcgtttcctgtgtgacttttagcaagcctctcaacctatctgctttggtcttctcatttgtaagatgaggtaagaaaagcacctactgcatagggctgttgtgaaaattcacctggccagcaaatctgataaactcattggagagtaagaagtgatagctgttttgggttaatatggttattactttgggcttgatattaaaatatcatgcgtacttcaacagtctggtaaggcaggcatattttagggttggggtagacatcttagattctgataaatcatccctttctggccttccacactttagtgttcattcatacaagtgacatacttcttagcttggcaacacaagattctccatggtcttacccctactgactcttcttatcttacctcctgtccccatactcaatattcaatttatttcaataatctgcctccgattccctaaacataccattctctttccagcctctatacctttgttcatgcagcttcctctgactgggtttgttcttcacttggctaacccctcttttacttaagcacaccttgaacattccctccttccccatttccccgcagtgcccctaatggacatacttctgaataacacaggtggtattccttccttgttggaacctcctggaggaagagacagatgattaacaaatccttccatcaacccctttgaccatgacatcaacagtgctccaaattatggggtaccgtattagcctatgtctatcttgatcagaatccttacctcggtgtattgaaattatctatttcgtgcctgcctctttaaagtcagggtttgccttatctattgtctaacaccatgcagtaggtaacatgcagtaggaaacatggcattaaattatttgggttcaaatcccagttatggtgtgtaaatgcctaccaggcgtgaggcacctgctaagcaggttgcacgcatcatttgaattcacaccaccctttgcaatagaacagataggcaacagaggctcatttgggctaaaggatttgatggaggggaagtgccaggattcccaccaaggcctcagggccaggtccaaggaccatgtctgttgtgacaactgagtgcattcatatcccctcctcctgtggggcaagttccctcacgtggagaagcagtaaaatacaatccatctcttggtgggctttaatgccttcctcttcacccagctgctgtgttccacctgtcagtcccacagcagctccccagccacactcaggtcccagtgttctgttacatgagtccagtcactggcattaaccagttacctgtctatcctttccaacaggaaatgaaatttaaaagagacaaggccaccctggaagagccgctgaaagctactattgatgggtcaagggggtaatttctgaaacaactgcttcagaaccaaatactgcctaaaataaatggatctacaggggctcaacctcagcttccccataagagtgttggggtgggtgtgataagggcctatttccccttctaccatactcagtcacaagaggtttcagaggttctctatagaaagccaaatgtttcttttggagaaggggctggaaattgctcccataggcagcagaaatggagggaacctactacttaaaaaaaaaaaaatactgaggcctgtttccaactgcaaatagttctctgtgctgacagactatatatatatatacacatacgcacactatatatatatatatatatatatatatatatatacacattttgtcctggtttgccttttcaaatggctttctttaccaggttggagctttagcagggaagtgtgcagtgtgggtcttataaacatgggctctaaagttactatgactctgagcttccttttgctcacctgtggatggagatatatgtatctgttactgtattaatccattttcatgctacagataaagacatacccgagactgggaagaaaaagaggtttaatggacttacattcccacatggctgaggaggcctcacaatcataggagaaggcaaggaggaacaagtcaagtcctacatggatggtggcaggcaaagagagagcttgtgcagagaaactcctgtttttaaaaccatcagatctcatgaaactcattcactatcacgtgaacaacacaagaaagacctgcccccatagttcaatcagctcccaccaggttcctcccacgtcacataggaattgtgggagacacaattcaagatgagatttgggttaagacactcaaaccatatcaattacctaaggtggttttcctagccaactagcatgtctatgggattcatgcccatgttgtgataggatagctgcttgctcggtcacaacatacagatacatcttagactcagccccctggcctgcctcttccctcgaagcttcaccatcaaggcctatgaccaggttctctagctcaggagtggtttgctccctcttgtccccactctgttacttgatttgtccttggcacatggtctatttaaatggtattgactggcctatagcttagagcttgatgcttagctagtcagaatggggtgactgagtcgttttcttgtgctttaattgtatatatttggagctatgggttgaaggtggtattgtaaggatagactggatcttgccttggctcttggcacgtggcaagctgatgaacagtcttcctaggactggggtgtctgagagcttatccatccttgtgttccagcttcaaaactggtagctggttggggtcgtaagcaacatctttctaatattgatagcaccattttctttaaaggttgtcaccttgccattatcaactactaaaacacttagagcctctctaacctcatatggaaaatagaggagtgatatgtacttgaaagggctggtgtatgaattaaataaaatataaatctcatcacagtctctagcatatataggtgctcactactggtagttctcttgaccgccccctccccaccaactcccttctgtttcccaaggggagggcagcatgatttgaggaaacagcactttaacaaggaatctaggttctagttccagctcagctccatcaccaggtcaatgacctatttaagctctgggcctcagggttttcacctgttgaaagggaggcatcaatccttgttctggctgcattacccattttgagactccaatgctgcgtgaaccagtatagtagccactacccacctatgtctattgagaatgtgaaatgtggacagtccaaagtgaggggtagcatcagtgtaaaacacactggatctcaaggccttaatatagaaaagaaaatatcttactaataatttttacattgattacatgttgaaatgatattttcatatattgaattagtaaaatacattaaaattaatttatagtacctgatcccttttaatgtggctagcagacagtttaaaattacacttctcacttacatttgtggttcacagtttatttctattagataatgctgctctcaggaaacaattgctggaaccttaggtaaatgtaacctgtttcctccttgcagcaaaaggaaatgctctcatatccattccagctttaaaattctaggaactactttttataaaaagaaatgtttctaaacactgattttgtttgtgtgtgtgtatataatgctttatgtaccctagaacttaaaatataattatatatatatatataaagattttatgtgtaagggattatcattactgattatagtctgatcattattataactagattacaaattgaccactaatatgattagagacaagcaatatctggagtaatttctcatctgtggagaaaaatattgtgggttaaaaggcgaaaaacacatagggattattattttttttttcttttgagacaagatcttattctgtcgcccaggctggagtccagtgatgtgatcatggctcgttgcagcctccatctctcagtctcaagcaatcctcccacttcagcctccaagtcgctgggaccacaggtgcaccatgtccagctaatttttgtatttagagacggggtctcaccatgtttcccaggcttgtcttgaacttttaggctcaagcaatctgccccctcggccccccaaagtgctgggattacaagcatgagccaccacactcagccaggaacaccttcctgataggagagcagggatttggatatatgcggggagcttcttgcctgctgtatatctcctgtatccctttgctggcaaccagctcttattccctttgcttacacccagtatagaagcatgcaacatgaaaatcagttccctttgaccaagcagctctctctctctaagaccggtattaatcctttttgacaagtctattcactttagggaaaggcattggcaagatgagggatatggaattctatccggaaatagagggaaaatgaccgtttatggtccatcttgattcttcaaaacctgctcaaaggggagagatttgccatcagcccccctgccatccagccatcaatggagcagaaagggtcttcctcaccatgtaggggtctttccagccggttattccagctcttggcacccaagccctcccatcattcctcatctccccatctgtgctgttaggggggcattcagcctagaggaacgaggccctgtgggtgctctgcagatggctgtgtgagcagcatagaaccccacctccatcctcccagcaaccgctgccccagcccaggcaggtgagcaaccgagcaagcttggaagtgtttgtgctcctgtttttaccatttagaatgaggagagagcttatctaccttatatcttgagtctcagattccttactcccttggtactattttcagtaattactggctaagacgaggcacatttctggactcataaataataaggcagtcacagagaaagagtgtctggctttttcccaggctgttttttccttgcctgtgtgtcttttagtttggatttaagcctatctcctcctgttgcacccacttcaaaaatggctttacagtttggcctcaaggtacttccagaaacctatggactagggtcctgctcacagggatcatggaagtctttcctagccctgggcccacagctttggttaaccttatctaaagacttgctgggactttcggacttaaaaggtctgcttggctaaagggaggggaaacggagattatacaaagtgctttaccatggggctcctccctcagtttcctgcttctccttctccacctttgcttgttgtgctctaaaacacaacatcctatttcaagcatctgtgcaaaccttactatttgctctgatgagaacaccctcccccaaccttttgtcattgttaaagacccagctcacacttcaccacttccaagaagacttccctgactccaccttctcccactgatgatcacaccttgttcctccccatgccaggtgatgcttgtttgcatgtatgttcttcctcttcttctccccattcttcttctttcctcatgcaagaaattttattgaagatcttcgtcatttcaagcaaggccctcatgtgtctcccattcaaagagaggttgaccaggaaaagcagtatggagagggctttgagagagaaaagaacagcgtgtcaagctgtgaacttcttgagatcagaagtcatgtcttctttatgcatccttatctctccaacatctagtgcagttgtttgaataaagagagaaatgaatgagtggtgaaaatcagaatacgggagccgaaagttactttagagtagctgtcctcaagctttggtgggtgttagagtcacttggagagacccgggttcgttgaatcaggctagaccctattcccctccattgttaccatcttccaggtgactctgatgcccactaaagtttgaggaccagtgatagagcagtaattcttaacctcagctgtaattggtatcacctggggaattttaaaaattactaatgcctgggtctgttctcctcctcccctcattcttattttattggtctggtgtatagcctgtgatttgagaggtttaaaaggtctccaggtgattctagtgtgcaacaaagtttgagaatcactgctttagagttcttctaggctaacctgccttgtagtttgactcttcatgatattctaacaagtgattaatacaagtataggtgcttggcactttgtcaatttctgtcctcaattttctgaggtaatgtagacaagacctgggcttggagtgagaagtccttggtttatatttaagctctgtggctaactccagattcttgaatattaagatctggattttttcccccatctgtaaaatggggagaataccagccttcaagtgttgttgtaagtacagaatgtaatgacatatgtgagacggctaagcacaagccccagaactcataaaataaatacagaaaagggtagattgatagtgatattgatatatttttaaaatatctgaatgtgttggcataactccatcacttgttccttatggacatcgggagtaacacctccctttctcatgaaataataccaattattaatagctaccatctatcgagggcttatgatatgccaagaaccatgttaagtgatttacatggattgtcacatttaatcctcataaaaattctgagatactgtgacagatttacagatgaaaaactgagccttagggaaaagtcgtattttgaatagtgacatcctgcctgcaaaagatgtgtccatgtcctaaactctggaacctgtgaatttttctttatttggaaaaggggttttgcacatgtaattaaattaaggatcttgagatgagattatccgtcattatccccagaagcctaaatgcctacaagtgtccttataagacagagacagagggagtttttagatggacccacagaggaggaagcaatgtgaaaatgaaagcagagatcacgtgatgcagccacaagctcaagaatgccagggccctcagaaactaagagacaaggaatgaattccactccagggccaccagaaagagtgtggctctgctggattttgtacttctagcctccagaaatgtgaaagaataaattgctgatgctttaagccactaagtttgtgataatttgttaaagtaacatcaggaaactaagagagatttaagcaacttgccctacgtcacaaagcagtgaacccagaattcaaacccatgttcttaatcaatatattatgttgcctttaagctgaattgaactttgtaataaaatgtcttaggttcatttattcaacaaatgtttattcagtgcctaccatggacgaggcctgtactggctgaagatacaaaaatgaaaaaggcagaaacattcttccctttggatactctacaatttagtggaagagaaaaactttagacaaggtttttcacatacacagaaatactgaaaatcatttaattccagcaatgataggtgctgcaaaggagatgaatgaaaaaataagacttatcctggaatataggatcagatccatcctaggtaggcccagctaatggctgaggtagaggtcagctcttcattccctctggcctgtttactgagggtttgagggcttacagctccactttagccctcctgagcttgcagaagttggtccacaaacagattatttggggataaagacccacaaaagaagaaaggcagtaaagaattcagcagacggcgagctctgcaacccgttgcagacattattatgaggcagtggagtgtgtgaaaacttcttttagacaaacttcgaaaatgttgtgttcctgtaccaagcaagatttcctgtagggtcatgagaagctcactaatcatctctttagttccaagctatattacttcagggaagtttctgtcaaggcttcatgcttaagtatctctttgtctgggtttattctgtcaaatgcttatttgcttaaaaaaaaaaaatgccccaagccttagttgatctagcagcttaggaagttcaaatccccgcatacctcagaggcctcctagcctctgccctaattgctgcaaataactcatgatttcattatctgtgggcccaaagtcagaccagacgaactctggccgttggactatggttgtatagaattaaaactgacttacaagatttttctatccatggtctttacttgtcttctgaactcagagacctgaattcttcccaaagatccttcctaggactctaatttcaaccccaatgtcctcaatagttacattcacttatacattcaacaggtatttatggagtaccagtcatgtggcaggcactgtgctgatacagaggtgaaaatacaaaattcctgtctcatgaacctcactttctggtggagttagcaaatccctgtgtgggaagtactattatacctgacacttcctgagcaccatttaatgtgccataaaaactctgcaaggtaggtactattatgttcatttcacaggcaggaaaacaagttcaaggtaaagtgacgcagctagtaaatggcagagccagaattcaaatccaggctttcctggctaccaagtccatgttctcagtgactatttatttctaaaataataatctgtgtgtatagggaggaaagaaggaacaggcttagaaggctttttgctggtaggatatcctttctggaaggggatattcttgattacccttaggtggtttttcttatttgtcttttttctttgattttcatactttctttaataaatatcctatactcttatagtcagataaaaaataagtagaagacataaaaattgtaaaactcatatatacccccaaagaattgaaaacaggtattcaaacaaatgcaggtacgcacatattcatagctgtattactcacaatagccaaaagatggaagcagcctaaatgtccatcagtgggatgactggtaaacaaagagtggtacagacatacaatggaatattatttggccataaaaaggaatgaagttctgatacatgccataacatggataaatctcaaaaacactatgctgagtgaaagaagccagacctaaaaggtcacgtgtatgatttcattcatgtgaaatattcagaagaggtaaatgcatagaggcagaagttgaattggttgccaggggctggctagagtgggagaagggagcaattgctttataggtacacactttccttttgggctgccagatctgttttccaattagatagaaatggtggttgtacaacattgtcagtatattaaatgccactaaattgttcactttaaaacagttaattttgtgttaagtgacttttgccaaaataaaacaaaaataagaaaactctaaataaacaaaacagtcacaatgaagagctttggtcttgctattcttctgtactgccaggtctctgagggctacaaaaatgaatttaacattgcaacgctaactgtttttacttagtgctacagccccatttccccgtaagagccctggcatgtccactaataaggtaaccccaggccattcactaaacctctctggacttcttgtgtcctcagttgtcacacaagggtaaaaatgtctacacgaagtcattcccagatcctaatatgataatgttgtgcttcgtaaaatgtaaattgacttgaatatatgtctctttatttttacatcaagaaacagtaggtgatctgaaattatctctgcttaccaagcatctgtgttaaaagaactgtgagcataaggggtgaaatcttggtaaagtgtctatttagaggccatgctttctgttgatgttgacattgctgttttttgtttgtgggggttttgtttttgtttttactttataataacatttatttatataaaaaggaatgtttgggctggggctaggagaaatgttgaggtaatggaaaactctaataatgcgatcatctattgaagacacgagctcagggaaagcctttctactggtgacaggcatttttctgctaaggattcccaataggaatcaaatactgctgaagatagtagaatcagacttttgtgctggatcgcaggtaaaccctgggtagaccttgagatactgcccttgcagtggtgctgagtaacagaaggatgctagcatcctgcatcgagtcagaggagctcactgtagcccatccctccagtccacccagactagctagacagtgccttcttagctctcagcagccctcatcctactgagagaggaatttggagaagacctggggaaaccttgaaagaccacctcagaatccagctaaacagcttgggtcctctttcccagggccagttgaggcaggagactaatagcaggaagagagatggctcccagctgttcagctcttttaaggtaaggtgggcctgatgtgtcacctgtactgtttattgcccttatccttaaataattttcttcctttaaaaacaaaacaaaacaaaacaaaaaactagctcttgcaatatctaaacatatttatttattgtagaaaatctagaaagtaaaatgaagccaaaattatgttactgctaacagatactgtttgtctttttaatgcatatatttttacagatatatttactgaaaaggaatcatattgagccattctcttttgtaaacaacatttgtcccttagaaacaaattcgcaagcatctttctgtgtcattaaatatttttaacatcatttttattggccatattaaatgttgatatggtttggctctgtgtccccacccaaatcttatcttgaattgtaatccaaattgtaatccccacgtgtcaagggagggacatggtaggaggtgattggatcatgggcgcggttttccccatgctgttcttgtgatagtgagtgagttctcatgagatgtgttggtttaaaagtgtgtggcagttcctctctctctttctctcctgtcaccttgtaaagaaagtgcttgcttctccttcaccttctgccatgattctaagtttcctgaggtttccccggccatgtggaaatgtgagtcaattaaatctcttttctttataaattatccagtctcaggtaattctttatagcagtgtgaaaatggactaatacaaatgggagctgggcgcagtggctcatgcctgtaatcccagcactttgagaggctgaggcaaatggatcacctaaggtcaggatttcgagaccaacctggccaacatggtgaaaccctgtctgtactaaaaatacaaaaattagtagggcatggtggcatgcacctgtaatcccagctacttgggaggctgaggcaggagaatcactggaacctgggagacggaggttgcagtgagccgagattgcaccactgcactccagcctgggagacagagtgagactccatctcaaaaacaaaaaacaaaaaacaaaaaaaacaaaaacaaatgtgttccattgtagaggtattcagtaatttactgaacctattatcacctattgttgaaaagttagaattattctagctttgtgttataaatagtagggtgatgataaatgccttaaagggcccaggacagtacctggcctcatggaggtacctactacacagtgttctcttaaatctctctgcatatttacatccctagcaacagtgcaggagaatgtcctattctactactacttaccttcactcaaactaagtattgtcattttcttggttgttgtcaattttaaaagcaaaaaaatggtatgtcattgttattttaaattccatttctttgataactaaggttgaattttttatgtttagtagccagtttatctctaacatattaatttttctcattctactattaagatactgatcttttgtttgaaatctgcattttttctagtttaacttttaattttgtttgcatgtatattttaacatggaaaaattttatttttatgaaattgaatctatcaatctttggtgtcatgcttagaaaagccttccattctccaagatgatcaaaacagtcacttatattttctttaaggtgttataagtaatcacttccttttcagtctgaatcaaattgagcaatatttccacccctaggaagggcagcagattagtctggtgccagagacaacttttctccacaacctagactcagggaatctccaagttgaatgacctctagaagtcgtataatgtgagctcctggctgataacgtgattcccgtcttccagaagcctgataagtggtggttcctcgcttctgtactactggtgggagtataaactagtacaaccactatggaaaaaacagcatggagattccttaaaaaactaaaaatagaactaccatttgatccagcaatcccattacccagaggaaaagaagtcattatacaaaaaggatacttacacacacatatttatagcagcacaatttgctgttgcaaaaaatgtggtatcagtccaaatgcccatcaatcaatgagtgtataaagaaattgtgagatatatatatatgtatatatacatacacatatacacacatatgtacatatatatatacacacatatacacatatatatatgatagaatacttctcagccataaaaaggaatgaattaatgacatttgaagcaacctggatggaaatggggactgttattcaaagtgaagtaacacaggaatggaaaactaaaccttgtatgttctcactcataagtgggagctaagctatgagaatgcaaaggcataagaatgatacaatggactctggagacttgggggaaagggtgggaggtgggtgagggataaaagactactaattgggttcaatgtttactgcttaggtgatgggtgcaccaaaatatctcaaatcaccactaaagcacttactcatgtaaccaaataccacctgttcccccaaaaggtatggaaataattttttaagtggcgtttccttctagctcaacactttcttaagtgacattacacaagaataacctattcttctttttgagaaactctaaaattaggtaggcctttcttatgttgagccaacttgtcttcattctcactcttctgtgttttattccctcttctgctcagaaagtggctgggggctgttctctggactttgcagtaagattggcctgagtttctaatcttatactcagtagctgtatggctttgggtaaattacttgatcactttgagctatagttttatcatctatgaaatgggggttcaaaaattactattattacacattctaactttgagacagacaaagctaaatgctggagcaagtgggcatcaatgctattttatttagcagttatgtgtggtcattttagacttgattatgactcaagttttcctttagttctatgcttctaaactgtgtatgctgtattcaaagcagtatcttgtagtataatttatgcttaataaagaaagccaaaatatatctgtactagtccattttcacgctgctataaagaactgccctgggcttggtaatttataaagaaaggaggtttaattgactcacggttccacatggctgcggaggcctcagaaagtttacaatcatggctgaaggggaagcaggcatgtcttacatggcggcatgtgagagagagtgtgtgaacgggaaactgtcaaacacttataaaaccatcagatctcatgagaactccttcattatcagaagaacagcatggggaacctctcccatgatccaatcacctgccactgggtccctccctcaacacatggggattatggggattacaattccagatgacatttgggtggggaccccaaccatatcaatatctctagataaaattgtaaatactttgaaaagaagcaagaaggatcaaaatcagtgtcataatatattaataccaacaatctgttatgaaacttattgttacatagatgtgtcctcattagttccagtgttcctttgaactttggataaaatgacaaatagcctttcagaccttgtctgtttttaggtagaggacctggtatatggacacctaaacctcatgaggttgatttgagaattacaggagatcatgcagagctctgatagtgcattttcattatgatgttattgcccacagaatctcttctttctctgactaaagtttccattcatttcattatccccttcctagcttgttttccagatccttccctcataaaaggtgggctcctggagtgagcacagaatactttgtgctgccacttcattttgcactttttttctgctaattcattttatgcttttatttctcaacctaaattatctgctgctccataacatcaacttattaacttattgttgacttttaatcaatggcaattaactaaatctcctgtgagtttcttgcggtttttaccattcacttgcatctcccttttctcatactcattgtttaattctcatctctcattgtataatcggtgttttgtgtcccagcactcactagaagctattcctattatatttcaacatgttagatttgtcatattatttgatgctatcattttgcatgctcataacatcccaactttgtgtatgatattaatttcgttctttttctttttttttttttgaaagagtctcactctgttgccaggctggaatgcagtggcttggtctcagctcactgcaatctctgcctcccaggttcaagtgattctcctgcctcagcctcctgagtatctgggattacaggcacctgccaccacatccagctaatttttgtatttttagtagagatagggtttcaccatgttggccaggatagtcttgatctcctgacctcatgatcttcctgcctcggcctcccaaaatgctgggattacaggtgtgagccactgcgcctggccttaatttagttcctatctaagatgttgatatggctgttggcaggaaaacaatgtagacagagcctctatcatgattataccttgtcttgttgccagtgtggagaactgcctctcttctcttacaaatgcatgtagtttagattttttaaaaaaattcttttcactgatttcagcatcttcctgtttctctgaactttaaggtcagcattcccattttgtcacattaattcactcaacaagcatttgatgagctatgtgccagttactgtggtaggtgcataaataagtaatatgcatctgtcctcaagatgctcacagtctagtggaagaaacagatcaaatgaattgggcacataataggtttggggaagtttgggtaagactttgtggaggtgacatttgagttgggtattacaggatgcatgggcgtttgctaaataggaagcagatcaaggacacatctggccatgacccacatctcctctctttagcccacatgaatgccaatattgcatgcatattttctctcacagttgctgctgtttttctgaaagcagtgttttctcattcacaattagatttttgttcttggcattctagaagatgcaattgccatccagaaatgctaagaagaaaaaatatgcaccattctaagaggacttaaaaaaaattttttagatacatagtaggtgtatatatttatggagtttttgagatattttggtacaggtgtgcaatgcataataatcataccatggaaaattggttatctattcccttaagcatttatcctttgtgttacaaataatccagttatactcttttagttatttaaaatgtacagttaaattattattgcctataatacccctgttgtgctatcaatactaagtcttattcattgttttaaaaatatggaacacttcatgaatttgcctgtcatctttgcccaggggccatgctaatcttctctttattgttctgattttagtatatgtgctgccaaaacaagccccagaggaatttttaaggtgtattcagatcattgaacatcctatatcactcttatgtcttgtttcagtactagttttatgatcattaattatcgtatatttatattaataaaaataatatttgttaacatttatagagtaccttccacatgctgggtggaaggtacttaacctaccatccttctgtgaatagtacctgtgaatcatacctgtgaatggtaccttgcatatattatctccttctaccattaacaaagaagaaatctgagctcagagaggttgagtaacctcaggtcatgtaactaatcaagcagcaaaacagatttgaacattggtttctctgtctcctaagcctgaccatttacattttcttattctaccccattggtcaatataccctctgactctcttccttggtctttacccattgattctcctcgtaattgcccttcgtattagtctgctagggctgccataacaaagtaccacatgctgtgtgacttaaacaacagaaatgtattgtattacagttctggaggctggaaagtccaagatcaaggtccagcaggaatcagtttctggtaagggctctctttctgccttacagatggccactggcgtcttgctctgcccttacatggcagagagagacagactgacagagagagaggtccttatatttttatgaggccaccaatcttatcagattaagaccccaccctgattacctcattaaatgtcatctcctaaaaaccctgtctccaaatacagtcacatcggggttagggcttcaaccctaactccaatataaattttggaggaacacagttcagtccattgtacctttcttaaaacatcacatgtattttcatttctccatggttttgcttatgctgttttcccagcataagctttctgtcttttaaaatctttccaattattcattacccaactcaaatgtcatttcccatgaagccttctctggttttccagtcaaatttagttgccctttcacctactcaataatgatttttttgactgtattttgattgagcccctattttacccaaactacattatatacttaagctccttgaagttagggactctgccttaatatgctcccagtttgctcccaattttattggtactccataacatttatgacttgagtttttcattagctctaaagaatgatggaggcaattgggtgggtgtaggctagataagagaaatgcttgtgcccatctccaagtgttggaagtgatgccttacagaagacagaaaaaatgttgcttgaggggtttagactgagaccaccaggtaaaagttacaaagaagcacacttctgcccagtttatggaagaactttttaataaataacaaaaaggtgaaggaaactaacactcattgataatcagttgctaaactgctgctttacaatttccacttccacatggtcctataaaatagttcccatcttttatagatgagaaaaccacatttccaaaaagtgtaaagatctgatataagatcatgtagcctacctccgtcactcattccttcatggagaagtaatctccctttctctagaggaattgaagccatctgcatgaccagttttcaggaatgctatatcgagaatgctctgggggtgttggtataactaatattttagttttctttcatctctaaagtcttctgactcaggaattctctatccctgacatagacttaatggaaatagacctataaaacctaacttctcccatccctttgtgggtaatatatattagaaaacttatatttagattattacaaattatctttacattgtttcatgtatgttggtccagtgaattaggggtgtgtgtgtgtatgtatgtgtgtgtacatatgtatgtgtgttttgagacaggatctcactcttcgcccagacatgatcacagctcactgcagcctcaatttcctggcctcaatcgatcttcccacttcagcctcctgagtagctgggattccaggcacacaccaccatgcctgcctaatttttgtagagacagagttttgccatgtttcccaggctggtcctgaactcttggacttgagcaacccgcccgcctctgcctcccaaaatgctgggattataggcatgagccaccacgcccagcttctgtcagttagtatttatgaagctgtttggaggacacagcttggaaatatccatactaacaaaattgacttggttctgaccagtagaggctgtatttttcaaccaaaggctacactgtctggggaagaaaatggtaatatgcatgagttgtccacgactgtagaagtcagatggatgaggtacttagccttgctatcctgagtacattccatgctgaaggtgggtcccagcagcctgagccccccagggtcagcttctggggcaggcagccaatgttctgatgtagctgccatttttcttggatgattcatgtgtgaaaatgtctcccccaaaagaatttgggtcatcttgttctttttcccaaagccaggctcttatcagaccagaagagtctcttcatacaaatggatcccagttgggaagtttatgaatgttaaggatagttgctcattccaaaatacataaccctttttgtctgtggcatcttatatttgactatattgctttttctactcaacagaattggatcttagaatcctggagctggtgtatgtgtgacttcagagataacttaaaaatgatcacgtatttctgtcttctaaattcagatggtttaactcattatttcttttttcttgtgaaggcatagccttgaatttgaacacagcttttgcttttgtgtgtgtgtgtttgtgtgtgcgtgtgcatgcactataacattttggcttgtgctatgaaactctttttttttttctggtcagaagaaagatgacaacactgaatcaactgccagtaacatccaaaaccagttcaatattaccccctggtttcttttcctaggaaaaatatcacaggtatcttcctcctcttccattttcattatacaaaatatggccgggcgcggtggctcatgcctgtaatcccagcactttgggaggctgaggcgggcggatcatgaggtcaggagatcgagaccatcctggctaccacagtgaaaccccgtctctactaaacataaaaaaattagccgggcatggtggtgggtgcctgtagtcccagctactcaggaggctgaggcaggagaatggtgtgaacccgggaggaggagcttgcagtgagccgagattgtgccactgcagtccagcccagttggcaaagtgagactccgtctcaaaaaaaaaaaaaaaaaaaaaaatgcaaaaagcaaaatatgttgttcctgcatggagattgggggaggaagagaattatattttgcagtgtcttgcaaggaataaataccatcaaaacacttgaatatgaagttgacactactttggaataatgtagcccattgtgcctgaagcttaacagacatgacccaaagaaaagaatggttcacacaatatcaagagtactttgtggcagaggtgggaccagactccatcccctggtcctcactgcacagccttataacatcatagcttctcaaaagtatcctaagattgcaatggagaccagaccaagcagtcagccccatcagagcttggaggatgctatcagggaagtgtatgtttgtttcttcttaatcacagtcctattgtaagcctcaaggatttaggacccacaaaaggaaattctcaatttccactgctttttgtactcaacttttaaagtcaaagatggaaaaggtaagaaaataaacaagagactttttttaaaaaacaatattctgtatgacaccacttatatgaggtacctagagtagtgaaattgatagacagaaagtaagatggtggttgccagggattgggaggaaaggagaatggggagttagtctttagtgggcacgaggtttcagtttgagaagatgaaaaaagttttgggatggatggtggtgatggttgcataacaatatgattgtacttaatgccactgagctaaacacttaaaaataattaaaattgtacgttttgtcacgtatattttaccacagttttcagaaagtgcaacgtccttggtataatctggaatctccatacccctatgcacatgcatccccagaaacaggatatcgtattctaaagaatgataataacaaatttatgctatttttaattcaccttaattttgttgttttcaaaataattgcatatacgtggttgcatctgacagtcaccaaaactgggagaaaagcataactgatcttttatttcacagatgagtaaactgaggctcagagttacactgctgacaagtaacagagtggtactagaacccaggacttctgacatgtattcctggagccatgcatgatcctgtgtaaaagttctaagttgatacttaacatattttacttactaatcttagaaaagagactaacacattttaaaaggattttcaaaaacttgaagtggtttagaggttttaagcatgaaaataagttaacttagttacctcattgtctagacatcctgattaatggaggttttactatatagtaataataatgacaaacccttatatagaacttcactgtgcaccaggtactgttctaagtaccttaagaacactaactcatttatcaaaatgtactatttgtatttaaaatgtataatgaaatttattgagacttgcatgtgccaaacactttcctaagtgctttatacactttatctcatttaatccgtgtaacagtctgaagcaacaggtaatactagagcttggagatgtgaaataatttgctcaaggatacatgagaacaagtgacacagccaggactcaaacccaggtccacccatctctttactgtgattcagatggtgtcgtgtgtgtctttctattcactgttatctctaaatgttagttacgtcattcaggcagctggagcagtgtccaagtagggatgctggttggctcatagtttacttcttgaagacttctaattttaccctgaaattctggctggaaatttgattccattgctgaaaatggaagaaatacagctttcatgttcatgcacaatttgctttttcatttttttttttttttattatcctgagacttactgtaaatcacactttcccatcagtcctgggggttctgattatgttcatggggtctagctaagagcaagggcagtaaattactgccactttgtttgaaaatttttttagccacagtacattagctgcttttgtttgcttttccactggtggtgtgcccatttttatttcagaatttttgtttcttgaatgtctcatttgtgaataatgtagcttccaaaatggaatgattggagaaaaaatatgaacgagggtgtcttgtttggcacctgtaagttttttaagcatttatagcaaaaatgaattattgagtcccccctctttctctctcatactctctctcactcactcatctgcattctctttccttcctattctctccattctactccatttcccaaaaaacaattgctagataatgaccattatggtggctaatatcaggtaactaccaagaagtgccttcttccaggcttctgtaagtattcttgtttatttgaaagattgatagatcagagggtcaggggatgtgttttattgtaagtttctgttccaaatttcctgacattttccattaaaatatataaataaataagccttttaaaaggaagaaatggaactaataagaaccagaccctaaagtgatggtcaaaatgtcaaaaataactgcttttcctttattcagtatcattaatctcgaggtagatacctacctttccatagactctccctaatagcttgacctgattctcttgctgggctattcacaaatagagtgacttctaaagtgacaccaaaatcctcagtagctcttcaggaattggtgtgggagttcagtggcaatattttcatatgtttttcaaatcacatcttttggtaaagtgatgagaaaggaggctgtggcacacactagcagtccagagcacaaggccccctcatgagtctccatcatcataatgtttgtgagatcatcctaaaggtgctagaaaatagtgatgcttgtgtgcaacctagatgaatttgaaaattaactgattttcctcaagtttgtcagagtttctaaagtggctttggaaagggttccattgcacacgaagaggaagcttaagttagacaatgtttgtccttatcaataatccatacaaaaattgtttatttcattttcttggactttatatgcgatacctttcagggaggctgcctacctcataatagccctctgttgtctgatagctgctttcacgacccatcatgaggggccttcagcagccatgtttgaatttataaccctgtccttctggtgagagttgattggaccagggagaggacacctggcccaggttacgccagagtctctttcccaggaatttgcaattggaactcagaggtagcctgttagtgtttgtcagttgctgttagtgccaagagatcaatctgggggccatagagtgttgatcttctactgtgtgcatagaaaagccaagaaagctggttttcaaagagagatttaagcagattcataaagagaattagagtctgggggtggagggagattcctgatctggttcccggcagctttccagttcttggttctcgttcctcccgaaacctggccagacatcttgccagagtttcacaagaaacccttgcatcctgtgttaaattccccatccacctcgtctgcttttcctcaccctcttacactggcttgagttagttcctgttgcatgtaatcaaagagtcttaacaaagacagattgatacctctctggtgtgtatttgattatagagatggccaagtaaacacatagatggatgttcatacttgccctttggtaccctagaaggtttgagttgggaacaaacctcagagatctcctagccttatcctcacattagacagatatggaaactgaagactatagacaggtaaaataagtgatttacccagggtcacacagctaggactcgatccctagccttctggtcctcaggccagccaatgttctttctaggctggctccctagtgccatccatccatccatccacccatccatccagtaaatataaactgagcaagattctgctacatgacaggtactggggtacatgttttttgtcctcaacaaactcacagtgtggaaggaccaaagttctttatgtttatttttacttcattccctggggtttcccatctggagggcactttactaactttgctagcccacgatcacagcgagttcatccaggagtctcccagaatatactcccatcatgtattctctgtgcctcttgggtctattctttcctaatatttgtgataatccatgttcatattgaatctcccctgggagatccttgaaaccagggactgtgtgtaagtcattgcttttacttcctagcacggaatctgtcacaagatacttctccaataaatgtctgcttttctagagaatttacttcactccttagaatctcaagtgagagctgtgtatcagttagctcctgctaggtaacaaaccacaacaaacatagtagcttccagcaacaatcatgtattattattctctctcctggttctgagagttgactgggatcagctagatgattcttgtgcagagtctctcatgtggttgcagtcagatggtggctgggtctagggtcatcttaaagactttgtcattcacatgtctggtgtctcgactgagaagacaaaaacagctggagtctggaacagctggggctgtttcacacacaagtgttgtttgcacaagagatgtccaagagcttctctttattctctccaagcactctccatgtggtggcctcagggtaactggtgactgaaggctcccagagggattgcctcaagtttttttaaacctgactctgaagtctctcacacagtgtcacttctgcaacattctgttctcagaggtcctgccacatgcaagaaagacacgatcacagaggtcctgccaggtgcaaggaaagggcacacagactccaccttctcatagaaggagcatcaaacaatttgcagatagttttctacatctctgcttgatatgtcttcctgcatgagaaatatgaaaaaatgaacacttttcagggagctttcatttcagctggaagccatgattttcagacaactgatagtttctggcttcactgacagctacatccattgcaactagtttgctagcccgagctgcagttactcacagaatttgctaactatggactttagtggcctaggagttagcatgggcaggcaaggtggatcagggccttgttttatcatgcaattcttgtgtgctgggaactggctaggctctatggttaataagaccgtgatgaaaagatgccttggggttcctcaatgtagtcatatatgagtggttctgtttttagttgtcaccatgatgagggtgtgcagttgacatttattgaataggggtttaggatgttaaacacgctaccatgtgctagcaatcctgctggaggaggaactttcctaccaaaaatgctaataatttctgacctaatgtcagaaacacagtgaagtggggaagctgtgagaagtgcactgtggagtcctcagcagatatgcatggtacatgtcaccaagggtggcatctggtttgtgtgccacactctccccaaaacaactgcacagcttctgcccttcctctcccctctgcagccttgctctccatcaaggcccaatgcaagcaccccctactctctcacaccttccctgatttctagagctggacaggttcaccccctcctgagcataaaacagccctttccttacctctttccttgttctgattattttcatatgtttcttttgtatcactgttttgcgaggccaaggagagatgggacaggtcccccctccatgtccgcacaagtatttaataagtatttgcttatttatcttctgtttcccctctcctgtctactcctcgcctcccctaaatgcctgcacattccagcaagaggacaggaagtctggggtttctccgcctctccactccacactgggtcttgcccactctgcctgataaaagtcagggaaccatctggcctctctgccaccacctcagtaaccttggccagcctgttttgatctcagcctccctttctccaccctatcttgtgaatgccttcaacactcagcatcttgaccacacacttggcttttgctctcactctgacttgtacttccaaattagatccctagaatagctctgctttccttccagatcttaaggggctcctgaaggacagaggccgcatcacctctttttaaaaaaattccaccgattgcaaggtgttacctcctttggaaacccttctctgacacctctggcctggaaaatgggttaagtttcccctttctagggttctttaccaccctgaacatacccagatcacactttatcatgattatctctttacctgcatgactgtgtagccaggatgagtgatctttgagtgcaggctcttaggtttttgtttatctatttataatagatagcaaaataaaaatagatccgttcatctcttcatctagcattttacacgtctatctttagcaagcctgtgatcagtttaaggagccacagcaaatgaaaaaggcatggtcccatcctcaaagttcacggccttgtgtgttgaattgatttttgtctcttgctacaaagaaaatagtagctccttcagtcttcatctccagatttctcagtgcttttctgttttcttgaaaagcagtagagcagataatttctaattgttgaggaatctggttcaaaatttcaaggcaaaaccgccccattcatgagagagaacattcaagtgacagggccttcaccattgcactgccctgctaacaggagaccttgagttgtggtcaagtcagcagattcttttaaattttgaaatacagatcttgcataatgaatggagaaagggagaaagaatggcttgtgtgcccttttgtgctccttgaagtttacattctgggaaaacatgaaactggagtgtcagccttggtggaactgagttggaatgctgactggcacacaaagggattctggtcctgtttaaccaagatgtgactttagaatactgagattgtatgactttatggatccccagaggaatagaaattcatgggccagaatgacaaacttttattttgaaagccacctaggctccacttagagccatcaaatgcttgagaatttattatgactgggcaagccactgcctaagagtcaggccagggtagtgaaaatacacacggactttgtctttgaatgacctgaatgtggcctagttcttcctagcacagggctctctaccagagctgaaagcacaactgttgcatttgcatgacatagaagcagccaaaagcttccacagtgaggatcatgtgtcgtgttgatgctgaggcatctcctgtgcatggtactgaaatcacagagatgacttatgatgtgttctgtttgtgttggcccaaagcccaaaccagaaatgtatttcaggcttggctttctagattctatctccagtcatgtaaaagttcattacgtggacccactcatcctgtcctgctatagttaaggtctgtcagcatttttcaaaggtttataattcaaccacaaaggagaatgcagtctttaggctgcaatgtgacctataaagcttaagccccggggtcagaaactttgcttttttgttgttgtttttaagttaggcccttactaagttatagtgaagcaaagtaatagctggtggttttgttattattatttggtttggttttacagggatgggaaaagcttcaagtgacttcttggaatgtagatgtaccctaaacctaaagagttgttaggactatagatttacttatcatcctagcattcagctaaagatgggggtttagtttttaaaaatttagcattttaaaattgggatggatgaggctgagaaagttagaaacaagattgggaatatttcaccaaaactcaaggaccaattctcaagccagaaactttgtattcaaaattctagttaaaagactttggtcatattatataaaaatcaagtcatttccctgatggttaagtttgtttctgctcataaattctaagtattcccacttagaaatttaagtgaaaagtgcacatatgataaatataaagtaacaaaatgataccttctcataataaaaacacttgaaaatttgaggtaaaatagatacaaaaatacactttctatgtctgttcagctgctataataaactaccatagactgggtggcttataaaacaacagaaacttatttcttacagttctggaggctggaagttcaagatcaggacaccagcatggtcaggttctccctgttgagggctcatttcctggttcacagacagctgtcttctcattgtgtcctcacatggtaggagaggcaggggatgtccctggggtctattttataaggggactaatcccattcgtgaaggtaccatcctcatgacctaatcacttcccaaggccccacctcttcaccctgagcattcaacatatacattttagggggccacaaacattcagaccatatatccacaaaagcttataatcagcaaaaggtctcttagagtaacctaatttgtggttactaaggatcccattaaataacctgctcctggggtaaaaataaagactggtaaaaatcatagcacctttggtgtgggaaggaggttttatctggatggtctcaagtcaattaatagtgggaaaagttcttaatgacagtatgttataaaatgcagattggcagtagggacaggagaagagtgtcaatggaactgagttccagtccaacctgtgtacagtctagctatgctaagacctctataaaccttggtatcttccttaaaatggggctggaaaatcctatgtatatatacagggttctggtgatgacaaaatgcaataatacatgtaaaatgcctgatagaatcagtgcctaatatatgtttttcccttcttctcccacctttattaattatacctgagacataaaacaatctaaatgctggagaccagccactctaatttggtagagatcttttcttaaaaggaaaaagtagtttccctgagcttttaagagtgcatttacatacaatttgtctatttgtaaaaaagacctattcattaaaataagcctctaagtagcaaagtgcaagttttcttaaactcctttgagtggcaccacatgctaactgggcttcctaaggaaagaactataaaggtggctgtctttccccattaaccctgatttatagggggttttgctctaagtgcatatttgcagaaccattcttaatgtgtgtgtgttctctccccaaaaaggaggcacattattggccatttgttgtctttggtccagtggatactctttaaacccactcttactactctgtagtcaatagcccaagctcagcttgatgcattagtccttgtgttttcaagaaaatgtgttcggccagcacccagcccagcacagcacttcttttcttttcacttttaaccatcatatcccctggtttccagcaggttcattcacccagaaaatgtttatcttcattgtgccacctcggtacttaacctggggcagaggtttggatactggggagtgcaagaggaagggttgggttggaggtgcggtttcactctttatcagttatgtgaccttaggcaacacacttaatgtctcagcattggtttcttcttgtaaacaagggattgtagtggagaatactcctgaggatttttgaggaataagttaattacagggtttaacaggaagccaggcaagaatcaggggtcaggaaatggtagtgatagttactgtagccaggtgttctcttattcactacacaggagaatcatttggagaagggcttttaaaaatgctcatgtctggattccatcctcgaacaattaaattagaatctctaagggtgggacccaggtatcagtatttttttctggaatacttttgatattccagagatggattaaatcctttaacccccacaacatccctaatgggtaggtatcattattagcccatttcacatttgaggaaactgaggcttagagaggttaaatcacagcaagtaaaaggtgatgctcagatatgaagccaagcagtctagctccagagcccatgctcttggttggtgtgacgcagtctattattataagcagtgcctccagtgagatgtccggtgagaactaagatccagcaggtggggtcatccgatggtttcggtcccttcataccttcaggttacccacctcctgcttttaccttcagctctgtgtgttcaggacttcccagcagccctgtatcagataatgaactgtggttattcagaagtcccccgctattttcggctgattttattaaactcagcttgtggcttgaactcaagaatgtgcaagctgatttagattatgctttgcattgagtttattaagataaaaaatatttcccgagatagtgagtcagaagtatttatggtgaagtgtgctgaaagtgaatgcaggttgatagcgtgaacagaatgttctctccaagtcaaatgcgatgacctaactgtgtttggcagccttcctttatgtttagctaagcatttcatttcatgttgggaacctcctccctcttctgaaaagcatcagtcatgtgggaggctaggattttggcatgtgcctcttttgataccaagacccaggccctaaacctaattgtgactggctcctcggctgactggctgggttgccatggcaatggactgctcaactctttatatctcagtttctctcacctgtcaaaatgggaatataacacttggccccaccttcctccctgaggagagatgggggcactttgaaaattaagtaataaatgttgggaaggatttgtggatttgtggatgtgacatcttgtcaagtgggtaaataataaatggggtgtctccaaagctaatttgcctaaaattcacttgagccttccatttacttcatcaaccagcgtttattaaatgcctatgaagttcacaataacacatgaagtgctgaggggaatacaaaaaatgtaaaaaggaggaaatagagtctcaattcccagagaggtcataaaataacttttttcttgcagtttgctttttctggttcattaagcctcagtacagaccatgcctgcactgtatttaaaaagctcattctcaatgatgacttccagttacgtcataagcaactagtggtgatttagttgttttcagtaccagtgggtattgtcacatgcttgatggactcataaaaaggcaagaatattttttagttcaggttatgagtggtgcaaaggacaatgaaagactacaggttggattgattgggaatctgattgcatcagaacataatatggtctctgctgttcaaaggcgtgggtttgggtcctggctctgccgctttctggctgtgtgactttgggaaattccttaacttctctgtgtctcagtttccttatctctaaaatgtggtcagttttagagtctacctcataggattgttgtcaagtttaaattaaagtgtgtaagatgctcagaatagtgcctggcattttgtaaatgctcagaaaaatgttagctatgatcatcactttccattgttaatgggagaagatggtggcactaaaaggatactggcatttcattttcctacattgtaaaggtaacaaatcctttttaattcagagtcctaaacttttgcccagatctgacacaatcgcttgggattgccccaaagccccaaactgcttgttcggaaatagaaaacatgccatccaagccactctgctctctgactcataccgttcagggcctgagctaacccattttgttctgaaagccttacaccagtctaggaccctgagggctgggaaagggcagctatggagtgtgatggaaacagcgctgggcttggtgtccaaatcctggctttgccttttattagctgtgaactctgggataggctgttaagtcctctgaactgcggtttacccatcctaattgtgcaaaagcaatggtgggtgaaactgctcaaacaaattcagacaatggcaccaacggtaccaaactagtggtcactgtacattccactgccatatacttgtagttgaaaagaaaaaaaaagccaattgcacttaagaatatcttccatggagcagtaaaaattattaattgtattaaatcttgacccttgaatacatagatttttaatatttcatatggcagatgggcagtatacgtaaagtactcctgccaagtactatgactgtctcaaagaaaagcatttgagttctgagctgaactagccacttttactttaaagaatgaccgacagaaaaattatggttagttattcttgaatattctttaaaatgaggaaaatgaacctgccgcttgaaggaaacagtagtattaattgccaataataaaatttgaactttccagaaaaagttagaattttgcgaaacttttagccaccatcacgagcttgacaacttcttcccaatcataactgatggcactggtggtgatattaatgcatttgaattttctatattagataagtaagggtgtccacattttgaaaacgaacgtaactcagtaaaccagtgttctctaaacaggcaatgcatgatgttacaaaatcgtatgtaggtagaataaccattcaaagtacaagataaatcaatccattataatttaatagattatgaaaagtttattgatatgatttcagatttcacattgcaaccaacgtttaagaaactaccacctatcgaattttggtgtagtatcaaagaagaatatcctaaattatctgaaagactattaaaaacccttcccttttccaactgtgcgaagccagattttcttcaactaaaacaacatacctcaacagattgaatgctgaaacaggaggcttcagctgtctggttttaagacaataatagatattcaataataaaaaaaaaatgccacttttctcactatttttggtatacgcgtgtggaaaatattattttactaaatattttattaaaatatttatgttaagcaatgggattgtttttatttttaaataggttaataaacaaatattttaaaactttctcccctcagtggcatcaatattttaaggattatctaggagtcctgagaccaaagaatttgagaacttctatcctacagcatggactctggagccaaaataatttgtttaaaatctcacttctacttactgtctgtgtgatcttggacaactttcttaccctctctgtgccttaccctctctgttttccatgtgtaaaatgttcataacaataactgtcatgatgataaataccatttaggtgttaggtattaccaccatcattatgaaatcattattgttgtcagtgtcatcatcatcattattactagtattagcactggaaggcatcatttgttcagggacacagagctagaggtggattcagtgggactggaacttttcccttaagccagactataccctacctcccacttaccatctgccatcttgacatttgcagtctagggaagaagggaaaaaaagatgagaaatcttccatagctcaagcacatatcatcagagctactgaatcaaaccattgaaaaaggtacaaacagccaggtttacacataaaagccagattgctttgtctggcattcaagctcactggacacctgctgcctgtcatccagttgttctgcagctgcccatatagaaacacaaactgtctcagaagaagcagacccaaccccaaaggcccagattatgaatccaaagcccagggaggtgaagtgatggtctgacacacatcgctagagagtggcagaactgctacttgagtctagtgtgaattccctctggactggacacctttgctgggatgcccaggtgttctcgttctgcttactaagtaagcagctacagatggccaacaaatttgaaacttcttcttcgtcagtgaaaagttaaaaccaaattccctgtttgtggcaaggctcctttgttcagtaaacacaaagatctatttacatttcttttgttctctctggaaacacactgcttgggtcatctactacactgatttcaaggtgccctgcaaccctcatgttgtttttagatagatattttatagagcagatcaggtgaggtgcctggcctctggagggaaaccagaaagaacatcagccagcacccatggctaaagcttaggcccattaaccagacagtcttggctgaagttaggggaagagcacaaccctgtgggtatatgtgtgtccacggcccaccttggtttagggagatattccaactctccatgggtctcatggtaccaaatctcagccctcaatgggtctcatggtaccaaagcagactggtggagtgaaaagatttgggcttggcagccagagagatgtaaattggacctcagttctgccacaaggcctccggcaagtcactaaaccactctgatcctaggtttcctcattgtaaaacagtgataatgacttctcccttgcaaagttagcatacaggtgaatactaaagtaaagccctagcatatagtaggatttcaaaatagtccattattggtccagaactggccagctgcctcaaatggactttctttaggtgcttggctgagcctgaggattaaaggccattagtgatggaagctttgggcagtttcctgagtaaccatggggcaagtctgctaatctctgagacatgacttcctcatctgcactggaaatcatagtaattaatgtgcctttcttacttctctagattgttagaggataacaggagacagaggctgtgaaaacattttgtcatgtgaaaagtggtatacagaagttattgttataaaaacaatagtaacaacattaattaacatttttgagtgcttactttttgccaaacactggttgaagtgcttcccagatgtcactcactttcattttaatcctcttctaacagttccctcagatggagccctgtttattattttggtttttccgttggttaaactgaggtacaaagaggttaagtaacttgcccaaagtcacacagataggcaaggggctgacctgaattcaaacccagccaatcaaattccagaacctgtccaatgcagtattaatcactatgcttatagtggcattgttatgtgattgctatctctaagtttctctccacaaagggtacatagttatctattctcaatgaatgatatggggctataaaggcatgataatggctccatagagccatctgctaattagtctccctcctttctgggcatacctcaaacatcttaggaacatatgtgcttatatccatgagcaaacacattcgtggattgagtatagatgtatatagattggagaaacatgcccaaagatagagatcaaaatataaatgttaggaagcaaagcattagcaagatcatttatgggctcatgaatctgttgtgaaggataattattcattggcttaagtgagatggaaagtgtcattatggtaatgcagtagtcatgcttaatctgtttcctactgcacatgtgataaatgccattcatatgtgagacacactcctgtgaggctgcccagacattaacaatgttccttctgaatttggggggacggaaattaaagcaaataatgaatcaattatttttagcatttatgaactcattttacagacatttgggcaattaaattacccggttaaatagctcagaaaaatgttacttttcaataaacttccattaaattcaacaaatttgtggcgttctacctgtgctgtccagtacagtagccactagccacatgtggctatttaaatttaaaaattcagttttcagttgctccagccatgtttcatgcattcagtaagccctgtgtgactagtggctatcaatcagacagtgcagattatagaacatttccatcattgcagaaagttctggtggataacactgctagacagtagtatacactgaggatgcagtgatgaccagaacattcccatccctgcccttatggggctgatagctctgctgaacaagttaccccagacttggacctacggaaggacataggacaatgagaaagtatggcaggggatctatccaagaaggggtgcttaggaaaaatgaaaccaaagaaagctccctacccatgaataacagagcacgtttttaaaagaaatcaaacttaattaaaaataaataaataattttatctgcaattggattctacaactaatattaatattgatgtttaaatacttgattgaagaataagcttaaataaaacttattttgttattaaaattcatagtgcaataaatcttaagaggagccaaagcaaaatatacatgcagcatgattccatttatatgaagttctgaaacaggcaaaattaacctatggtaatagaaattagaaccttagttgcttcaaggtggggtgggagggagtggttgggagcagggaccaactacaaaagattgtgggggtactttctgggttgttgatgttctatcaagatagggacatttgttacatgagtatatgcatttgcctgtactcatagaactgtataactaagatctgtatattgcacagtattgtatatgaattaatctatatatatgtgatcaaaataattacatattgtaacatgttatggttgatatcagtaatattatggaaatgtccattgctttattactctgtctgcctctgacctggccttcataaccttatattgtcagtaacatgaaagtttcaggcatcctttctgatcttgtgccatgtggatatgaatgtgttgctcctacttttccaatttttgatgctttctttcttatcaaaagtgagcaaactggaaggatgtttgccaggatgttaaaaatggtgttatttttgggtggggagatttgaggtgaactttattttctctcttttgctatgctggaatttggaacaaggagtgtatatgattttttgatctgaagcacaaaagcttatccatgtagtcttttggagactttgggttctatactctgattagtgacaaattttcttccaagcagcaggctctatgggtggttatttagcagtcctctggtcttaatcaatgtgattgtttctttccttgtctgtctcacctgcctctcctgctcagcctctctgtgatcccaagggtacactggaggggatttggctgcttggaagccctctcaagctgtctgcccctctcacctgcctcctctctgtgctcacagattcttacctgaccctcgatgaaccaatgaataacatcaccacgtctctgggccagacagcagaactgcactgcaaagtctctgggaatccacctcccaccatccgctggttcaaaaatgatgctcctgtggtccaggagccccggaggctctcctttcggtccaccatctatggctctcggctgcggattagaaacctcgacaccacagacacaggctacttccagtgcgtggcaacaaacggcaaggaggtggtttcttccactggagtcttgtttgtcaagtttggtaagcagacccctactggggatggactttggccctcagcccaatgtggtaggatggctagagtccacagggacaggaaggaaggaatgcacacttagtgagaatgtactctgtgcccacaaccctaaacctggtatggttgtacccattttacaaataagtaaactaaggcccagcagttagttaccatgttacccagctagtaaacagcagagcaggaatgaggtccggatctttctgacctcagagcccctaattgaaaccatcgtgccgttgagctcttttcaacaaggatgcttcttgtccaagaagttggaaatgttcgcagcgtgcatggcccttttcctgccatcaaggactagaaggaagccccactcactgttgcaatcaacaccttcatgcaaccactcagcccattggaaactccctgcatagtttgaagatgcttactcgattaactctttttttagcacttgtcttagcattttcaggccctgaattgtgagacatagacacgttctcactggtattttttttttttttcatagagatggttgggggaatagagcaaaacaataaattccagaaaaataaatactacctctgggtggttgagaactttaatttgtaatgatttgactgtatccatactcaccctccaataacctagactgactgtttcttttgtttttctttcatttcttcaggcccccctcccactgcaagtccaggatactcgtaagtacttttatctcctttcttgtcatttctaagtgtttctccgtggttttctagggcaaaagcaatgttgtcctcttcttaagccaaaatactggcttccagatgtcattccattttgccctgccctcattccattttgcttgttctctgctctaaagattcacaggagaccaccattggcagaattctcaagtgtagtaatgttgattctgaatgatcaaagcaaaaatcttccatttactgttttagaaggaatctaacatttagtggcaacaatggattgatttggtaaaatcaaacaaaaaatgatatagtgctggcataggaacctttactctcagggtctatgtttctgcaagcatttttgatgaattcattattgatcagggcaacaattaggtaatcactttattttttattccctttaaagaactcaaaagcagaagttctggctgggcgcggtggctcatgcctgtaatcccagcactttgggaggccgaggtgggtggatcacgaggtcaggagattgagaccatcctggctaacatggtgaaacccgtctctactaaaaatacaaaaaattagccgtgcgtcgtggtgggcgcctgtagtcccagctactcgggaggctgaggcaggagaatggcgtgaacccgggaggcggagcttgcagtgagcccagatggcgccactgcactccagcctgggcagcagagtgagactccgtctcaaaaataaaaaataaaataaaataaaataaaataaaataaaataaaataaaaaagctgaagttctaacttacactgggaaagaaagtcccaagcttggactgagagttgcatggaagtttgattcattttgagtccctcgttaatggagtctaaaggtccaatttctttcactaatgctattgttgatgcgtttgtcatttgttctggctaaaggattctcatctttcactttaagagtatctacttggggcatttttctttatctatatttttattttgggggaaggacccacttattaaaactcttactctacaaaaaaaaatcctcaatactctgtagacttttgaaataaaatttttgtggctctgccacaagagcatcaaaatgtttgatctagactacacctatggcaaatataacagccacttaatttgctccaatcccctctgtgccacttaattacagtgtggggtattttaatacatttgtgtgtgcctggaggcccagtggcccacaatcccattaatgaaataggtaatgggtaaaaataaacattggccttcagccacacagttctgctatttcatcagccagttaaaggcaactgtaaaagagtctttaaaatcactcaagtgctaattgcattctacttgcccaggtagaaaatgctgattgatcttaaaacaggtcagaaatttggtcactctgccttgcatttcttgatgctaatctgctttttttttttttttttcaatggtctcaccattggttatatgtggaatccttttgaagtcttagttaaacaaagatgaaaacttttgttacttgtaaaaatgtctcccaccctggtaccttatttgttcctgttaatctgtgtttcaaatgtggctgataatctatatcccaggctgattaatgtggttcactaatctgcctttactattaagtactgtgttgttgactttcagcctgttgtatttgcattagagttctttttattatcaaaattatgattatatccttctatgttcttcttgaagttttcattcttcactgctgtccttctgatgaacccagtctaggtctctcgtggtttttaattttatacaaagattttatacccctgttgtgaaccgatatctatggagagggtattgaagttccttaaagatgctcaaccacagctaaaaagtatcctttgatatcacgcatctctgttttatattagctgtcagattatctattacattagtcggtaatagcatgaaatgtatagttaccatgtttgcttgcagggagttacaataaaatacaattcaaattggaaatcccatggggccttttgcagttacatctccattctgtttttggcattcctagttggcattttggtaccttttttttttctttcccagtgatgcatcctgctctttatctcttctcttaattgccaccacttcccctgtctctaggagttcttcacttcctgagactaactcccagaaagaatgctggttcccatgcctagcttcggagtagccctcaataggcagccaaccttctctccaaggggacaggcagaagataacaaaatgatagccatggggaatatcataacattgaggtccctctaaaggttgtttgtcaaattgtacactactatttccaaaagaggaatgaaatacagttataaattgctctgtttatttgaaagtggcacagagttactgcaaaagaaataaaaggagcatctatgacccaactctaacattcagaacgtaaggactgtgaaatacattagacatatgaaacctggtgagagctgaggtccactgaggcaacagggctacacaactcctgcctgggaagggcttgtagggacccttgggactatggcccagaaaggcacttgtcacttcctctgagggactgcatcaggtttccacatgaagctttcagaatgatattttagtttacagtaggaacaagcttgatattttcgtttggtttccgttcatagatttaggcttcatttcttctgtcattgctgggtcctggctacccctaacacttataggacctggggcatgagtacaagcagaggttcacataccatatgtctaaatatttaaaagttataaatcaagctagcaacattgttgaataaaatatgttctatcttcccacagtgtcaaatatacctttttaacgttaaaattttaaaatacatagaaagttgtggtgtgttttaaatgattaagagccaggaactatgaaaaatggctattttaatcattgttatgcatgtctggatgttttgttcatgggccaaagatatcatatataattcatagattgttatatattagttccataaaaatttgtttgccttcctttcaggaaaatgactacctaagttgttttatgcaagatttttacagtgtatattctattgataacatcgctaaattagacaaatttgtttttctttttgttttattttattttattttattttgaaacaaggtctggctctatcacccaggctggagtgcagtggtgtatgatcttgggtcactgcaacctctgcctactgggctcaagccatcctctcacctcagccttctgagtacctgggaccacaggcacgcactaccgtgcctggcaaatttttgtatgttttacagagatggggtttctccatgttggccgggctggtctcgaactcctggcctcaagcaacccacctaccttggcctcccaaagtgctgggattgcaggcttgaagtactgcacctggcctgaacaaatttcttaagtccttgtcattcttgcttttttttttggacaggttctggctctgtcatccaggctggagttcagtggcatgaccttggctcactgcaacccctgcctctgcattcaagcaatcctcccacctcagcctcccgagtagctgggactacaggtgccagccaacatgcctggttgtaattcttacactgtaaaactaattttaatttggagaaacttcactccctggagccagtggcagctatagttatcaataaaattcctaaagtgatacttaaatttggaaatgaactaagaattatacatgccatgttcaaacacagaaatggaatcatatatgacaaataatcattattgtagaatatattacaaaatattacaatttaatcatataaatcagtatcatacttcatacattatcctaggtttgtacaaatttaagaataatatgacttgtttaatgtgttaattttcttgggctgctggaaagtatcacaaactgcatggcaaaaacaatagaaatttagtatctcatagttctggaggctagaagtatgagatcaatgtgttcatggggttggttctttcttatggctatgaggaaagatttctcctttccagaagtgtgtcagaatttttccgtattcattggcttatagatgcatctccccaacctctgccttggtgttcacatgatagtcttcctatatgtgtagcccttaatttccccttttcataaggacaccagtcatactgtattgggatccaccgtgacgacctcattttaacttgattacctctgtaaagacctatttccaaataagatcacattccaaggtacctggaaattaggacttcaagatacatatttgggaggacatggttcaacccataacacttgatattgcaaagtttttctcagccatgcaaaactcttgcaaatgttattctaatgtgtgagagctttcagaagcgctggttggaatataatgaaaatagatgtttggtaatattgggaatgatagtttgttgtgcaagaatattttgcattcaaactgagagaagaatttgacacattggttaatttatcttttctcctgctgaagtggctctgccagtgtagtttctcctaggctctaagaagagtccatctcctccactggcagtgtcacaatacacaaaactttgacagtatgcagttgtggtcaccttctattccaaggacagagggcaagacatgtagagaaatgttccctgggccagaacagtgctggtcacaaaaatagatgtctaaggttttgattacattgtgcgagcactcattgccagatcccaagaggcaaagggttccatgcgtactctttactctcattacatatattccctgtgtattttttgtatgtaggcccagggccaggacctttctctctttttttaataacagttttattaagatacagttaaccataaaattcactgttttaaagtgtgcgactcagtctttttactatattcacaaaattttgcaactctcactactatcttattttagaacattttcatcatctcaaaaagaaacttctcccagctatagtagcttctaatttacttcctatccctatgaatttgcctattctagacatttcatataagtagaatccgacaatatttgtccttttgtgtttgccttctttcacttagcataaggatgttgaggttcatataaattatagcatgcatcggtgcttcatcctttttatggctgaataacagtccatgcatggctataccacatttcgtttatccatttttctgttgatggacatttgggttgcttctactttttgcttattctgaataatgctgccatgaccattcatgtgcattgtggggtatgtgttttcaattctcttgggtatatacctagaaatagaattcctgggttatatggtaattctatgtttaactttttgaggaactgcaaaactgttttccaaagaggctgcagcattttgtatttgcagaaggatagtatatgggttccaatttctccacatgctctccaacacttattttccttatttaaaaattatttatttatttatttatttaaaatttattatagccagccgggcgcagtggttcatgcctgtaattgcagcactttgggaggccaaggcgggtggatcacctgagatctggagtttgagaccagcctggccaacatggtgaaaccccgtatctactaaaaatacaaaaaattagccaggtgtggtggcgagcatctgtaatcccagctactcgagaggctgaggcaggagaatcacttgaacccaggaggcagaggttgcaatgagctgagatcatgccattgcagtccagcctggccagcagagcaagactctatctccaaaaaaaaaaaaaacaaacattattatagccatcctcgtgagtgtgaaatggtatctcattgtggttttgatttgcattttcctaatgactcatgatgttgagcatcttttcatgtgcatattggccatttatgttttctttggggaaatgtttgttcaaactttttacccattttttaaattgaattaattgtctttttattcttgaggtgtaagagttacttattttgggtatatacccttattagatatatgatttgcaaatattttcattctatggattgtcttttcattttcttgatagtgttctttgaaacacaaaagtttttcattttgatgacattcaatttattacccattctttggttggttgtgattttgaaaaccatcgcctgatgcaagcgtacaaagatttactcctctgtttttttcctaaaagtttttatttacagttttagctcttacatttaggtttttggtccatcttgaattaatttttgtatacagtgtgtgaggtgggagtccaggttcattcttttgcatgtggatatcctgttgttccaatatcatttgatgaaaagaccattctttacccattgaattgtcttggcactctgttaaaccaattaaacatgtgtctatgtgtctatccctattcagttctacatagtcttgattactataggtttgtagtaagttttgaaatcaggaaatatgagtactctgtattagtattccactggagaaacaaaaccagtaaaattgtgtatgtatacatatataaagagatatattacaaagaatttgctaaaatccttagggcagggagccaggaggcacaggctgggaacttttgggcagttgctcatgccatagtccacaggtagaatttcttcttcctcagagatacctcttaaggcctttcatctgattggatcaggcccacccaaactattgaggatgacctcctacaaccagtcagttgattgtagatgttaataaaatttataaagtactttcacagcaacacctagactagtgtttgaataactcaggactgtaccttgccagttgatatgtaaaactagtcatcacctctttctatattgttctttttcaagacttttgttgttgttgttattctgagtgctttgcatttccatatgaattttagggtcagcttattaatttatgccaccaaaaagtcagctggaatattgataaggatggcattaaatctgtagattaatttggggagtactgctgtctcaacagtattaagtcatctaatccatgaacatgggatgtctttccatttatttaacttctctaaatgatgttttgtagattttggtgtgcaagtcttgctctcttttcttaagtttattcttaagtatttgattatctttcatgctattggaaatggaattttttcttaatatcatctcagtttattcattgctactacatagagatacaattaatttttgtatattgatcttatatcctatacccttgctaacttgcttcttagctctagcagtttttttgtgaattctttaggattttctatctacaagcttgtgtcatctgcaaaaagagattgttttacttttttcttttcaatttgggtgccatttacttatttttcttgctttattgccctggctagaaccctcagtacaatgttgaatagaagtggtgagagtggacatcctgttttttttttaccttatctttagtgaaaagatttcagtctttcaccattgaatatgatgttagctgcgtttttccatagatgccacttattagattgagaaaattccctattattcctattttcttctatgttttttactatgaaaagctattggattttctcaagtgctctttgtgtgtccatttagatgatcgtggtgggtttttttttgtcctttattatattaatgtgatatatcacattaattgatttttgcatgttaaaccaagcttgtattagaataattcctacttggccatggtatataatttcttcttatcttttgctggattcagcttgctggtattttgttgaggatttttgagtccatgtttataaaatatattggtctgtgctttgcatttcttgtgatagctttgtctagttctgatataagggtaatattggcctcagaatatattgggaagtattcctttttcttccattttttaagaagagtttgtaaaggatttttatttaaatgtttggtataatcaccagaaaagtaatctgggcctgaattttcatcatgggaagttttaaaattactaattcaactttcttacttgttataggtctatttaaattttctgtttcttcttgagtcagttttggtagtttatgtctttctagaaatttttccatttcattgagattatctaagttattttattcctttatcattcttttaatttctgtaacatcattaatgatagtcccttttttattcctaattttaataatttgtgtctttttttttcctttgtcagactagctagtctaactaaagatttgccaattttgttggcaaagaactaactttcgttgaaaactggatattgaaatagagtattgtgacaactgtggaaatcagattgcctctcctctgatgttgctgtgtgttgtttttgccgtttgtttggtgaatttcctgaattaattctgtatagtctgtattttctgtcatgtactccctttaaagagagaagtctcagccaggtgcggtggctcatgcctataatcccagcactttgggaagccagggcagctggatcatgaagtcaggagttcgaggccagcctgaccaacatggtgaaaccctgtctctactaaaaatacaaaaattagccaggcatggtggcatgcgcctgtaatcccagctactcaggaggctgaggcaggagaatatcttgaacctgggagccagaggttgcagtgaaccgagatcattccactacattccagcctgggtgacacagcgagactccatcttaaaaaaaaaaaaaaaaaagagatgtctctactcagttagcctagtaactagttaatgattggacagaaatttccttaaaccagtaagtctcctaccctttgccaagaggtttaaggaaacctctgtccagtcattaactgatcactaggttaactgaggaggtccaaattcatcctgcctcctctagtgactgctggggtgctagttttcacggttaccacagaacttgagagaggaaaatgagaacggcaaattaaaatgccataaaattccattcttaacaagcgttagttttttttttcctatatatccactccctcacctatcttatgacatatgagaaatcctaacatgggacttggtgtataattagcattgaatgaatttaagttttctttctttctttcttttcttttatcttctgtggtctcctgcagaatcagtctataaaaagggcatggtaaaaaaaaatctatctcatagcattgttgaaaagattaaatgacataataagatgatgcatatatagtagctagcactgtacctgatgcatattaggagcttgataatattactaacagtatcatcatcaatgctatctgagcaaagaggctgttccttctttccagccagagttcttctgttggataatatttccagctgtgaaccccaaccagagaccttgaagcctttatttccttttctctcattggcctttggctgaagtctcctttctgcagagaacaaagtgaccagcttttgatgaactattttcctcttttatccatttccaagtgttagccatagtgaagaagtgtagctgggtgctagcccaactcaagaagtgataatgtaatatccaacccaagataaactcaaggataactttcaacacggctactcaagcagttcaggggggaggcatcttgtagagaggagaccaggaagtcacttggcagctgggccagcacacagagggccattgctccagtaaagcagctaacctccatctcttcatcaaaccatcctagactcagcactctgcagagaaggagcagatggagggaatgtgtggagagattagataagaaggatttctaatctagtgggggagcgagtaaaatgtacagaagtttgagaagccaagctcttatgtaccaatccacccccatcactcaacaatccccactgtatgaataaagcctggaaagtttccaattaaaacagtgcttgtgaatattggcaaggggtatctttgtgtgcagggtacatttaaagggagaagggtgaagatacacccttgccttctaggagtacactttctgagagcttgttcaccaggctgtgagtttctcagtctatctgtttctcagtctgttagtaatgaatgtatctcccacttagcacagcagctagcacatagtagatgcctaacaaatgtgtgttaaattgaatgttggaagtctgtgtcctgaaagcttttcttcacatattacaaggctttttatttgttcaacacatttttaccaagtttttttctgtgttccaggtcttttgattagctgtttttaagtcacagaaatgggtgtcgggaacaaaaccagtcaaaagtcctcattctacatcatttacactttcccttcctatatttataagttttaatatcagcttctacaataggttccagaacaagtggtgctcaaggaatggagaaaatgactattccaaccctagctgtaggtgaaccaaaaaccccagagaaatcaaagtgtagtttaaagcagtgcttctcaagttgtaatgtgcatatagatcacctggggttgttattaaaatgcaaattctaaaagagcaggtctgggagtgggcctgggactgcatttcttacactttcccagggggtgctggtgctgctggttcacacacttagagaagcaggggtttagagaagaggtgcctggccagatgctagttctttctgtgtaatttgctagttcactagccagtgaccctgggcaaattgcttactttctctgggtcccaagtttctttatttgcaaagtgaagcacttgggcttaatgtcttttatgattttttttctatctacatttgatgactaactgaaactcaacatttcctctgttatagtaagatcttttcattgctgtgaatttcatgcaacttgctcctagattctctttctgtaccctgaggtgttaatcaccctcttttatctgtcaggcgcttctatcctgtgcattctaaacaagatcttatctagttactttcaaacagtgtgaaagatttttacagggaactctcacctggaaactctccctcaaattctgaagtggctgtgatattgtgcgctcctgggtgcagaggaagttactgctccttttgctggtcagtagcagactctacttgcctcctgttgaatagaacagaattttcttgccatatttcttcactaggctcctgctatgttgggtgactgcctgtgttttgaattgaatgaaaggattgtagcaggaggcagtgcagtggtggattcagcctcttaatgtcttcatgtgggtgttttttgttgtttttgttgttattgttgttgttgttgttttagatggagtcttgctctgttgcccaggctgtagtgcagtggcacaatcttggctcactgcaagctccacctcccgggttcatgccattctcctgcctcagcctcccgggtagctgggactacaggcgcccgccaccatgcctggctaattttttgtatttttagtagagatggggtttcaccgtgttagccaggatggtctcgaactcctgacctcgtaatctgcccacctcgacctcccaaagtgctgggattacaggcatgagccactgtgcccggcccatgtgggtgtttttaaagcactgacctttttgcctgactggtaggcccagaaggctgataagaaaaacaagatttctggctttgcatgtgtgacttgtgaatgcaggtccattattgattcatcacgtcttgtacactcatagagctttttgagggaaacaactgaacctcacaacaaacatagctaatgaaatgttatgaataatcttgatgatgttaaagggtggctaagcataatgatcagttcttcacataaatattgtatgtaattagccttcgactttgtagggtaggaaagacactcccctaccctcttaggttctgtggctggagcctatgaaatgaattttgaaaagacagattaacaaaagaaaaaacatacacattttatttgatgttaatatttttacatgacacagggggtttcttagaaagaagtgaaaccccaaagatatggttagacccaggggctcatataccattgtaaccaagaatgataaattgtggagacatgatcaggcaaaggaaaaagaggtttgggatagggtggtaaattgtgggaaagtgactagaaaatgcatggaggaaactaatggaaaaaaagtgttatgttagcaaggtttgtttgtacagattcctctcatcgtcaactcattatcttctgtggtatgaatgttttcttcttcgtggtttagggaggagatctttctcacaggaaatgtatgccctgacttttgatagaaaggaggaagacagcccttcctaaatcttttgtttctcagttgccttcagcccaaaatagtgaatatgccagtgaatcataatgtgggatggcatatcctaatcccctccaacttcttcagtggaatgtgcaggtttcttccttctttgttaagcctctggcttttttcagtgtcagtgttgacaattttatctaattgctctcctcttttttaaaaaattatttttaaaaattaaagatcatctgttgctgtcctctctatgtctctttctctgtctctctctctctctcccatacacacacaaacacactcattcacacagtcacacatgctccagaagcaacaacagctgggttctcattatctagggcagtgcttctcaactccatctccaccttagactcacccagggagctttataaattacctgtacctgggctacaccctagataagttaaatcagaatctctcagagtggtacccagtcatgatattttatcaaatcaccccaagtgatgtcatgtccatgcaaccagataggaccctctcccatcccccttctcacctgaaaggaacttgcattagcccagctctacctttctctctctctctctgccccagcaccatattgtagacaccaaaggagttgcagcagcagaaactgtgcctggatggcaacatgcctacagcatcatcaggatccaatcaggaaagcagaacaaattctggactatttaacacagagaatttaacatagggaattggttacacaggtgatgaagtttgccaaaaaagcaaacaagaaattgtgatgcagcatcagcaacagacagaagccccagctacacttaggttggagggaaaaatagaaggggtaatattaccagagcctaggtttggggtcatctttggaggctggaatggtggcatgtctgttctgtgggcactggagtcatgagaagatgcttccactgctggggttatcacccaaagcaaaaagaaatgggagaaacaacttggctgctgtcttccttcacactttcaaatgccagccagtttctcccattaggggaatgctgcaagaaactatatgacacagggagcctgagaatcacagcctgcagaggtcatctgccttgcagatgctgacccaagcaggaaacgggcaaggaacggatctgaagacaaataggtgcagcaacagcactcataccccagattgatttccatgccactagaaagccgagcctgcagacagccttgaagaaacaggctggggagaagacaaagcattcaaagctgcaattcctgcccaaccttcaggtagaacattcagtggacagtttggattgtggaactgaggcctggagcaaaggtcaaggctgagggggcagacatggtggtacatttggctaagttggtggacaaactttgaagggagtaaaactccccaagagaaactaaaaaggaacaagaataagcagacctcttttatttatagtactgtctgtaattttcagaatattttttcttttctcctttgatcttagagccatctaatagctttgactagataccctggtatttttgttttctatctagaaaaataaaaaattgataaatcatcatacccttgccctttatcataacaagcactttttaattgtgtagaggggtgctctgatctagacctcaatatttatgaacttttgaaggctgaaaatggagacagtaaacttctagatatttgcttcctgggcctccaaagacagaatttgctaactgtggcaaacacttactaagtgctactctgtgccaggcctttttataaaactttgcacaaaaactaatagactattacttccccatttactcacacaaggagactcagcaaaggatgaagctttgatttgagcccatgcaggtggactccagagctcagactttggccagtctgctataccagctgtccttattgtggggagatgatcagttgatgaactcttacctgaattacaaatttagtcaccttaagtgtttgattgctgaaaggactcacaacactcaaatggtttatcctcatggggtagttttattacagacaagggaaacagtacagcaacagcagaagacagataggtaatgcaggggtcccagagatatcagatacaggcttctttatcctcctaaaactgggttgcacagggcactctatctccaggtcttgaaggtttactggcatacatgtgcagaacctcagttccaagaagtccagtagtggaggtcacttatagtgagctgatcacatgggcacattccagctgtgtgacatacacttcagtgattgaagccccaggactccactgaaaccaggtgcaaatcataccatccagttattattactaaataatgctaactgactcatacatcctaccccaaacaacttgaagactcatagtttcagagcatcatttatctttagtaaatacatttcatagtgattgccgatagttagtggttctgaagattagtctggggtcaattcaggccagctgggatcaccctgtgcctttcaacccgcttggccttgcttagtatgtaagtcaggaacccactcctagaacttgaacaatggtaaagtcatccaggtataaatacttgccactgggatgggacgtgttccatagataacagaaaagttatcatggttcagtcattacaaatgtctattacttcagtggatggcctggtatttttgtggccagcttctgatgtccttgtcttctactcattattctaagactgctgggtagctgtcctatgtgcttacatgaaaccccaactttctctcaaggccgttaaaatataacatgatgagtgctgtgatacttatctgtgtctctagagcagcaatgctgtccactagaaacatcatacagggcacatatgtaattttaaactcactttttttttttttttttgatatggaatctccctctgtcgccctggctggagtgcagtggcgccatcttggctcactgcaagctccacctcccaagttcacgccattctcctgcctcagcctcccaagtagctgggactacaggcgcccaccaccatgcctgactaattttttgtatttttagtagagacggggtttcaccgtgttagccgggatggtctcgatctgacctcgtgatccacctacctcggcctcccaaagtgctgggattacaggcgagagccaccacgcccagcctaaactcacttttaagccacattttttaaaggctagtcaaatgaagcagtgagagtggagaaggaacaaagaaatttgcaattgcttgtgatcaatcagttgtaaacacgatggcacttggactagccttaagatacattttaaaaagttaaaagaaacataaaattaattttaatatatattttatttaacccaacatatccaaaatattatttcaacatgaaatcaatataaaattattacccgctttattcagatataattgacaagtaacaattatatataattcaggtatacaatgtagtattttgatatacatgtacattgtataataattattataatggaatatctcatatttttttttctaagtcttcaaactccagtgtgtacctgtagtttatatttacaggacatcttaattcagatgctaaattttcatggaaatacttgaggccaggcgcagtggctcacgcctgttatcccagcactttgggagactgaggtgggtggatcacttgagcccaggagttggagaccagcctgggcaatgtggcgaaacctagtctctaataaaaatacaaaaattagcctggcatggtggcacatgcccgtagtcccagctatttgggaggctgatgtgggaggatcatgagcccaggaggcagaggttcagtgagccaaaattgcactactgtactccagcctgggcaacagagggagaccctgtctcacaaaaaaataaaataaaataaaaaggaggcctgtcgcggtggctcacacctgtaatcccagcactccagcctgggcgacagagcgagcctccgtctcaaaaaaaaaaaaaaaaaaaaaaaagccatacttgatctgtacttatattttataaaatgaataattaaaaacataggttcacattcccaagttatttcaaatatactcaattttctagtaactgaatcaaataccaaaacattatttttctttcatttttgcatccacattgacaaaattggttcatcatttttagaataattgaattgactttgaaccacaatgtatcatttttcaaactatttctatccaagttaaataaattcttttttttttttttttttttgagacggagtctcgctctgtcaccgaggctagagtgcagtggtgtgacctcggctcactgcaagctccgcctcccgggttcaaaccattctcctgcctcagcctcctgagtagctgggactacaggcgcctgccaccgcgcccgggtaattttttgtatttttagtagagacggggtttcactgtgttagccaggatggtctcgatctcctgacctcgtgacctgcccaccttggcctcccaaagtgattcactatatcttgtatcaactcagtattatttatatcaaattcaaagggatattgcataaattgaaaagcaacactgaatttatcaatgtcaacaaaacatttaaatttttcttgcagtttatgcaggcaatttacaaaatgctgtcaattacaattaaaatcttcagcatattgatccgtgttaaatgtctaaaaacgtcatgattgtttatttgtattgtgaaaagcctcagttccaacatacattcttatatctgtctagctaggttacaataagcttttccttttcctggagctgcatattaagtttgttcatatgcaacatagtatcagtgcaaaaatgtaaatcatattgccatttttttttactttgattattatttggcaaccatccttccatttcaagaaagtcttgaggtggagttagcagtgcagtaaatctttgtaaaactattctacagtcaatcagcaagcactggcaaagaatataagatcattaaatccattgcctttgatttttttcaacatctctgcaaactgtcaatgattctatttgcacatatatatgaaatgattttaacgactgtatccatgataccttaatttataaagtctgtctcagaaaactgagcacatatattttcagtttgtatcacaaagtacaacaaagcaataagggaaccatcagtattgttttacaattccactaagtctagttttttgacctaatggctagagtaccatccattgtgatagaaatttttttttcatacctaactgaaattctttgacagatgtaggagattataaagtactccacaagttccgttttacaggctgcaaattgacatttctttgtgaatttggaagtcctttaaagtaaacatacccaaaatatatcttttcaagtttctcttgtatgtcatgcctcatcaaaaactgaagaaaagtttctgcaatttttcaaaattttaatcaattgattttatttttatattctataagctaaataatagctaaaataattatttcttttaccatctctgtatctgaaagtggttttatagctgtacaaagttgcaagcacagattctgttaaaattgtgtagacttttttttgtaggacatttatttaattctaatttcaggtgaccaatttcatcaattttttttaactggtggcggggggaactttaaaaaaaaaatcaaaatcactgtgtatttgctgaaaagggtctctttattattgtccactttattatctttaaagttctttttgcacaacaaacttttttgtgatgatccattatgaaatttgtggcatatcttcttcccgtctcttttttccattacttttttgtttcggagagactttccttgcctcaaacactacagaactcgtaacttctccacaatagtacatgtttgaatcaattttctgtttagggctaaaaatagaaattcagaaaacaggagcagcagtctgataggatttcaaagcagcattcagcagactacatttcctcttgggttaaatgtgtgtgtgtgtgtgtgtgtgtacacgtgttcatgtgtgtgattgggtgatcatcgtgattaaagagaaagggtaaattgcaaaaagaaacaccacgaagttgcaaagtaaaatgttattcttttagattagggttaattttgaaacagcccaccactctagcaggcagatccctgcagaggttcatgacaatgggagaaggcagccagcgctgcagaggagccagggaggccacaactcctggcccagtctccaagtaggtgtgggtacctggctttcctgggaaatctccctttatttttattattattattgtggtaaactatacatgacataaaatatacaattttagccgttttaaagtgcacagttcagtggcacttagtacattcacagtgtggtatgatccttaccactgtctagttgtagaacatttttattactccaaaaattcctcctgtacccattaagtggtcactccccatcttttcccactcccagcccctagcaaccactaatctactttctgtctctacggttttgtctactctggacatttcatataggcaaatgatcctgcctatgtccaggatccaaatgacaattcatataaatggaatcatacacagtatgtggccttttgtgtttggcttctttcacttagcataatgtgttcaaggttcatccatgttgtgacctgtgtcttccttgtgttttgatgaccttgagagacttcctggcatagcaatgaggcctggcattgaagccatgcatacctggatttgaatcttgtcccacctttaagcttcagttttttgttttgttttttgagagagggtctcattctgtcacctaggctggagtgcagtggtgcaatcatggcttactgcagcctgaccctcctgggctcaagtaattgtcccaagtagctaggtctacaggcgtgcaccaccacacccagttaaaatttttttttattttttatagagatgggatcccaccatattgcccaggctggtctcgaattccttgcctcaaaccatcctcgcacctcagcctcccaaagtgctgggattataggtgtgagccaccacacctggcctatgctttagttttttcatctgcaaaatggaaatgatattcatctcaggaatccttgtgggggttcatttgctcattcaaaaaatagtgatggagcagccactgtgtgccaggccaaggcttcacggatatagtggtgaacaataccaggcaaactctttgtgctcatagaacttggttctatcaggagaaatggacgataaacatggagaccaataaataagataggaagaagaaagtctaatgtgtcagagagtaatgtctgggggtaggaaatgggcaactttaacagcttggtgagtaaaggttttctgccaaggggctgacatttgagctgacctctgaggaacagagtgagccaggcttgcagagagcaagggaaagaaagattattctaggcaaaataacagcaagaacaaagaccatgacatggaaaatggttttgtcacgatcatggaacagaaagaaggccagcgtggccaaattggatgagcgagttgtgggaagtatgacttcaggttagaaaggcgagcaggagctacgcgttacttagctgtgcaagccagtgtttgggcttcattccaagagccatggaagccatgggagggtttcagctaaagaggtgatgtgtcctcatttacaatgggaagagcactctggcatctgtgcggagggtggacgagagtatgagcaggagctggaagagcaataaggaagtttttgcactagtctagatgtgaaaataggtggtttgatgacttggaccaggtcggggtaggtgagttgtaaagaagtaagaggatttgagatggcttgaagaggaggcaggtgtgaaggtttaaattatataaataaacaggataaatggaatctgcatccaaaatgcctaactgcttagaacagaggcggtgatcaactcatgtcccgttctggtccactcccccccgccccaccacccacacagacacacacacacacacagacacacacacacacacaaaccttggtggcttttgaagaagtatttatgggtttcatcctcatctggattttcccatcatcaggaatgagtggcaactgcggggagaaggatgtggatgtgtctctgattttcacagcatgaagacagaataagtctaccattttctattcctctataatcttggtctcttagaatagctatagccttcagcaatgatggagaagcagggttctgtgggatgaagcaattagccatgttctaggagagagggaagagccaataaggagggtgttctctcctctctctcagttgccagagctcagcctgaaagggattcccttcctctgctctcccgccaccgtggtgcttccctatgttacactatgttgtggtccatggtttagttctccaaacaggagaactacccctggcacaaagagggccttgattaatatctaaacactgaatgagcaacggaaaacaccagtgcttcttgtcttagagccgagaaacttctgaggttgcagaataacctgtgaagttttttcttttataaagataggaataacaatagcatctatgcaaagaattgcaaggatcatgagagataatttgtgtcattcactttgcatgatgcctggcatatgacaagtccttgatagaagtttgctattactaagggcctgcttcctatggcttctttaagagctgctgtgtgtaaatggccctcagagcctctttgagggctctggactaagaggaaagaagaactctggtgcagggacccaaataagctctatcagttctcactgcagtaggggcttgacggtggaattaacaaagtgccttaggtttactgccagttccctgacagcctgatttcccatgtattgtgtaccagatgagacataagggattgtgaaggcaaatgaaaagcaggatattgtttactggggccaatataaatatgtttgtggggagaggagaacaaagacctcaaagcctgttgttgacagaaaccacgctagtgtttaatacatgacgtcatcctagtaaaaataatagttcccacaggtctgccagggaatgggagagccggggttatctgtacccacacatgccaggaacctcaggggtgctggcaactggtatatgatcctgacccagcttccaactagctccatggcatgtctgagggaggggcttcgtggatagtatcctactctgagttccaaacacacagatcccaacgtctggattccacctctgctagacaccagcttgtagcagagaccttagctgggagcctggtttttcccaaatgtaaattcagataagaattcaacccctactagagtagttgtgatgaaaaaacaagataaataaaataaacaagatttaaaggaaatgctaactgcaagagagcctttggtattcatggtagcctcacccacttctgtgtgctcctctctcacctatgcagaagcattgaaattccaggcttcatctccagtctcaccaccctgaacccctactttgcttagcttccctcctctatgtaaatttgttttatttatttaggccttttgtaaggtgtgtgaaggtatctgggctaagagagtggaaggtcagtgaacccctgagaaaatactagccacttgggggtcctcattcttgcccaatcagtccgaagatccaactactcctctgtgtgccccttcctgctccatgtgctcctttattttacccatttttctccatggtaaatgcaagtgtaaggctttgaaggcacaggggagcctctacaagccctgagtggaaattcgcagccagtatgtgaaagcatgacttcaattttatgaagactgggccctaagaactggacatgatgaagcttaccagtttgccaatcttcaccttctgttttcttcccctgagagtttccactagaaattccccagctttggtttgagtgcttggctctgtaatcttggagacactctgcatacaccccacaattaagacatcgcaactccatgcaatgtttcttcagagaaagttagatgcaattagatcatttgaagatggattagcctgccatctgcacaatattaagaaaaatcatgttggcaaatgatggggcctctttgaagagctctgaaggaaagccactaatgggctctacactgggtttcccccctgttcccgaagggttaacacaatgtgtgggaaaggaaaaaaaaatcccctgtggcattaaaatgctgtgtcagagatttgtaagctcccctttgtagctctgccctggggcctggctcacttcagtggagatgaggttaataagacctctgttgctgcttggcagttcttaacggggttacagtctggtgcctgaccagtgaaggacagttattattaaagtgctgaggaatttaattcaataaggtcagggacatctgctgtgcttgcttgcccaatgtccatttcttcttctttttacaagaactgcttgcttttcctttgcggaaaaccacctcatgcccattctgtctaggtggagctgacccttacctaaatcagggtggccacatgaccaagccagcctagttagtgtatttgggtatccaaccgtgccccaaagtcactggacttgtcagttacataagcctataaacacctttacccctcaaccctcatttttctttttcagcttctgcaaggtggagtagctacattaactatttaagggattaaatggcatgaagtataattagatagaaactaaactctgtgggaagtcaagagagggagaggttgatgtgggtgggtgggcttcctggcagaggctgaacttgaactggtcttaaaggatggagaggattaggtgagaccaagagaatgcagaactctgtgcaaggcacagagggagggagaactcagttaaaatgaagatctgtggacaagaaatgaaaagtgggttttgacaaatagaggcagggaaaatgccagaggacttggaatcccaggatgagaagtttgaacttacctggatagttccccagtgtggacttatgtatgggtggggaaaatccacaccagattgtgctaccagtttgggcaagtatatgactctatgccttacctgtgttagagactggcacaggtgcaggcagggcactaaccttggctccgccacttaataaccgagcaacaatgggggagttacttaacctccaaatctcaatttttttccatctgcacaatgaagataaataataacctgacattcagtgtttgtgaggataaaatgagataacctacgtgggagcccttaggatagtacctggcacatgataataatagtagataatatctgttgagtgcttattagtgttcccgaggcactgtgctaagctcctgacataccttatctcatttaatcctcccaatagccagtgctttaaaaatgttggctgaatccgatttggggtaaccttgtcattcctgtgcttgatcaaacaataagcttatcagacatttactgtccaatgagagctgaatacataatctgaatattcaagttctaatttcttaatacacaccctaaaatgttttaaatttaataaaattacacttcagaacatctagagaatagagtaaaaaaaatgtacatataacttcactaaccacaacagaaccatgtttttctaatatagagggggttaagattatctgcttttaggcccaccagatcaccacagtgtgatctggggcaagttactttatcttctctcagccttagtttcctcatctgtccttatacgatgtttctagaagcttcttcataggggttttttgttttgtttttggcaaggtttaagagtgataattcatgctgtatggagcatctgacacataatacaccatcaatgttagctcctatgaatgcctccagtcactgtcctatacattttccctgtgattgcaataaccgtgtatatgcagttgcatccttattttttcacttaacactgtatctcaggcatctttataagtaacaagatctccctgtccctcattcctaatgtatatgttctcctaaagtcactttaagtgtatcaacttgcccttgcttcatcttttaaaaacatgtataagtaatgctgcactccacacctttacgcttaatggctctaagagttcacgtttcagtgcaccatctctttgagttcaaattatggttctgcccacaccttttcagaatgtggtgagaatgaatgacacccaagtcaggaaaggcctttgacaaattgcagattatgctggcttgataagtgaccacaggaaagtatgattgtcacttttccagcagtgggtttcctccagtgtgatattctgtgcctcacctatcaagaggtgttactgtgggtcttcctgtcagctcagttctcctacccttcttgctgacagaggaagaagaatcccactaccttttagctggaggttattctcctgatctcactgaatcttatttcttggagtagcaaggaatctgcaaaacaatttgaggctgtctttctgttgcaaatcaaagccccaacctcttatttgggtcttagagcaagagttccccaagtactttgaaattggacccttctgtacacacctggagtcaccagtaagccttgcccatagattccctggtggatggacacacaaagctaagggcaaaggtgaccttttcatttcttcttcaggtcctacaatgcctttgaaatctttatgatctgcaccttcagggattatacaaacagcttgaggaaatcctaaaattgtgttttctccagataagcatccaggtcaaaggaaagacctctgcatgccttcctgatagaaagaaacttgcctcaatttagagaatgccaccaagaacaaaattggcatgcagccatttgtgcagtgcattaaaaaccagtttacaaatagtggtacaattctggaagtgtcagacctcatagtgtggtgtagtggaagtccacagactatttaccatatttcaaatgtcttactgtttttaaacagcagcacaggataaccagagtaacacatttctttgtttctgtctcgaataacatcaattaagtaaaaataaaatttattatcatgcaagttataagctttccttggcaattatattttgatatatttatatgctaattttaacaaattttggttaacatatcttacagcagtattttttatattaataacggtaagaggaacagttacttttttacttagctattggttaattgagattattttaaaagctgtgtgaccttggaaaactgattaactaatacaggtatttataagatgtttggtctaaaataaggtatttaaactacctgagcctcagtttcctcatatagaaaaaatataccctcctcatatggctgttataggggaaaaagacacaatatgcaaagcacatagtacggaggcaaagtatctggcacatagtatggttcaatagataaataattttcccatagaaactgcaaatttatatatgagacaaaaaacatttcaagtatatgttcttgagggcagggagatgtaaggtttttaaaggttctttgataaaaaggttggagcatggctctttggctctgatcactccattggatacttaaaacaatgatcaactctgtcatcagaatgaaatgtccactgattcatctccatttcttaactaccaagcaacgttcttttgagggctttcacaccctcacgtatcctttccacctgaacctcagtggctgactttaccccaggccctgaaggcagaggtggagctgagctctgtgtctgggaagagagaagcaggcacgtcctctgatccttgcccaagggcctgctttgtgagtggggcatcaatgctgcttttgttccacctttagcgtctggcccacagctgaactcaaagaggctggctgctcggggcaaccctggcccacaaaggacagacagcaccaagcccagccaagggttcactcaagaccccaagatccagcacggtggttctccccactggggaggcagcctcagggaacattctgtctgcctttggcattctaaaccatttcgaatttcatgaagataagtcagaggttttaaatgtgatatcactgctgaaaaggccagagccatcagcgtagaaccagcatgtccttgctaattacaatacacaatcattgccttgtgttgatgcagtcatttgctcattcatcagctattaattgagttcctactatgtgctcaatgtgatgctcaatgtgagggacatggaggtgaaaagatgatgtccctgcccttaactctctggtgtactggcaaataaactgtcacctgctaagacaaatagaacataatatctggacactataacaaaaacctggagaagcagaaacagtctacataaggggccaataataaccattgctacagttgatcaagcatttgctgtgtgccactcactgtgctaagcacttagtgtgtattatctcatttaattcttaaaacacagctataatagtagtttgattctcttcctatctctctgggaaaggccatgcaaagaaaatggcatgtgagggtcttggaaaaagaataggagtttgccaactagacaagcaggggagatcattgcgggcacaggaaacaaaaatgatctgtttggagaactgcagatctttggtatgtgtggagcaaagggaatatgcagggcctcgtgtgagaatagtgattgcagtgaagtgagaactaagtgggatgaagcttcaaatgtggaagactgtaagcagagctaagatgtggaggaaggagactcggtaggatagtgcttcagttagaaggagggatggccacgtttgttggttcacttttgagatgcagagcctattcctagggtaggctatgagaagggaacaatgagagggagaaactaaaaatgccggacagagagtgactagtggagacaggacctcaccctcctctgattggaagaaagataagaagagaaccaaagacatagacacattctaagaataggtgttgggaggcagaacacaggtaagagggggcagaaggaaaagatacgatcttaagagttgtacctgcatgacgcctgatgtctctgaggttaaaggcaagtccaacaaggagagtgagaggtgacagagtattatagaggccttggtgaaaggagtaaaagtttggagtcattgttgagtacgatgatgaggtgctgataacacaaactcttgatttcgaggaaggagtgttcaaaggaggaggaggaaaatgactgctagagagaaaggtgatggatggcatgtgaaaatagttgagtgtgctgagaatcgttgattagagtggcgaaaggtaatgaagggaagacttaataggtgatttcaggttcagacatctgaatgagggcatggacctattccatgcagcttcaggagatagaacgaggtccaacaagtggtcattcctaggagacagattctctacccccaaacattaaacattaaaacatgtaagtaagtgtacattaaaaacattaaaatgtgtaagtaagtagcactatccagcaatggaataatctgcctcttgaaggatttcaatcatctgccaaggatgttgtgctggaaatttggtatgcttaattagatggcttcttctatcttttttaatactaacatatcatagatacttaatatatggagcattgaaatagatagcagccaattttggcattcttgcaggttgtcccactgtctgagccagagaatcttgattgggattttttttttttcttttttggagacagagtctcgctctgttgccaggctggagtacagtggcgcagtctcggctcactgcaacctccacctcccaggttcaagcaattctcccacctcagccttccaagtagctgggattagctgggattacaggcacctgcaaccacgcccagctagtttttatatttttagtagaaacggggtttcaccatgttggccaggctggtcttgaactcctgacctcaagtgatctgccctcctcggcctcccaaagtgctgggattataagcatgagccaccgtatctggccttgattggaattttcagtaagatttatgcagtttaagaactgtggaaacaatcttgattttttttttttattccaggaggatttttgttaagattagcagaagccatgctctagtatgagaaaaatacacatggtattattgagttaacaggcatgatgtgtatataatacttactacggagagggcttctttctataattaaggcagaatgcccatcccttctcattgtggatctggagaggacccttagctgggatgactaaaggaggagcctctgttcttaccttatttggagtcctcttctcatcatgaaagatgtttgcgcatctttcatgccctgtacctttcttttcatttgccccctgcatttgggattggttgctttcttttttggaacctatgagactatttcagtggttctcaactgagggtgattttgaccctcagagggcatttgacaatatctagagatatttttgattgtcatgactggagagggatgctgctggcatctggtgggtagaaggcagggatgctgctcaaagccctacagcgcacaggacagccgctctcaacaaagaatcagccagcccaaaatgacaatagtgctgaggttaagagaccatggtctgtttttaagtcttccttctaaatcagctgccaccaatacactctgtaaaaccccagatgcctacttttattttctaatttaagaactgttgtgtggttgaatactctgtctctgtgaactctacccccacccatcccgttcttcatgctgtagcaataagaaggacattttaaactccctttgaccagaaaagtcacttttggttagggtccaaacaagaaacacatccctccctggataaaggcagagatgccacagcttgcagagaaaaaacatcagacatttcccaatggcagcaactctgggccaagagtacggatggaggacaagctatagatacagccacatggtgcccttcatttgcttttgagtaggagctcacactgtctttaaaagattggacagtagagctcagccatgaagggcccctgtagcctttccaagccaggataagaccaagacggtggtatgaaagcaactgtgactttggcacaaatacagactgagaaaatggtacctgactaggttactcttatgaccctctgagaatccccacacagcacatgctaacatgtacctacacctctgtgtcccaaattaggctgaagttttcagttagccagatcataaattaggcctttgtagctctaagatcccctacccctgaagaatcctaggaaagcctcccttactacacttcatgactcagcattgatagcctgctccaacagaaatagcccaaggctgagatttcccttctcatcccttatgtttttcaggctgagcagtcatagggaaatcattcaaactcttagaacctaggttttcttatctctgaaatgaagacatcgaccttccaatttctgggaacctgtattgaaaaagtactctcaaatacggacataattttatgtacaaagttacttattgcttcattatttaatgttagacatattgtgaaatagattaaatatgacacatttatagaatggaacattatgtacccatgaaaaaataatatacatgaagagtttcattggctgtgaaaaatgcttgtgctctaatgtcaagaataagaagcaggccgggcttggtggctcacacctataatcccagcactttaggaggctgaggtgggaggattgcttgggctcaggagttcgagaccagcctgagcaacatagggagactctacaaaaaataaaaaaattagccaggtttggtggcccatgcctgtggtgccagctactcagcaggttgagatggggggattgcttgagcctgggagatcgaggctgcagtgagccatgattgcaccgttgcactccagcctaggtgacagcgtgagacactgtcaaaaaaaaaaaaaaaaaaaaaaaagcggcaaaatataacaccccccacacacatacacaaacacacatttatatgcttatagtatgatctcaattctataaaatatgtatagaaaaaagtctggagggaaaccaaactattaccaagagtttatactttgttttatgttagtatgtttataacgtttttaataaaaataaagctgaggtatacaataattcttttccctttaaaagcagagcatataactctcaagattgagaaacactgatttacagctgtagacagaactggggccagagataaaattttggagtcatagatgttttagtagagattgattactggataagatcacctaggatgagcctgtagagtgagaagagatgagagccaaggcttgaaccctgggaaatactgacatttagggaatggatgaggaagacaagccagagaagggaataagttcgtggcagtaatccatatgagataataacctatatggattaccatggtggcgttgggacatgcaagggaatgataaagctgataggcattttaaaataaattaagggttgtaaattacatgtacaagatgagggtaatggaaaagccaaatattacttaaacctctctagtttggaatatggaagaatgctgatatcaaggaaagcaatgggatagttgaaagagatgcatatatggtaggagtggggaagaggttaggcttagtcttgtatgagttgggtttgagatctctcttcaagaaaataactgctctaagaagtgcagttatctgaaagtccccagctgcagccccttggggatcggccataccatgcaagctgaggtcaccctctgcccaggcagctctcagccatgactaagcttagaagcagcattagagctgatcctctctgcccatgcgagcctcctctagtaagtaggcagtccttgcacgtgggctccccactaggctgacccagattctgagggctgaccttggtttaagctcttcccattcaatctcccttcttcccactcttctttctcagatatcaagtctgtatcatggtctgaatgctctccctgcctgctcttctctctctccctctttctcttccacaaacactgcccccagtaaatctcttgcactttgaattccatcttggtatctgctttccagaggaccagaaccaacacaagtgatggttacatatccaaaagaaattattgtggaaggaaaatagtacagttcttgaaagcaatcaggattgagggataactgaatctcaagagtctccctaatagcataattagagggaggagtggaggacaaggtttgaatcttatgttacagtcataattgggaaagagtacagttagtcttgtaattgggaagagaattcaggatggtggggggaagttattgaaaaagtagaaggaaactctgggaagtgtaggatcatagaacatgaaatagagagagagcgttttaggaacaggtgataatcagcgcagatgtcatcaaagaaaatctgagtagggactgaggtcttgtatttagagactgacagtgtggctggctggccatcaagtgattatttcagggaaagaatgagaataggtgccaagtttacaggaatgaagaagaaacatagtgggaaatagctagaggtaatgacagtagacctcacattgaaaatgtttgtccatgaatgagaggagggaaattgagctaattagagtaataatttccaagattgagtgtgtgtgttttaggaacacctaaccatttccagaagagggctttaaaggtgctagagagagagagaaaaaaaaaaaaaaaacaaccattgtagaattaaaatgctgaaagcagtgggaagagaaaagctactgaggccagagggaggggttagattttaaacagaagagagaaacctcttttctggaacgtggcaacaagaagatggcagaaatgacagagatataaggggtgagagtgaagaacctcacgcttagaatgtgttcctggtacaaaagtaacaagaccaacctctaagaataagagaatgagatggggaaaatgtgtaaagagagtggagatgatcaggaatggctggtgagcatactgttattccttaagaaatgtgatggggcaaaggaaaatcttgccttaaatgcatgaagttggatctctgtcaagtactggtccaaaggactgtgactctaattggtaagaaagaactaataaggtcctggcatttctcttacatcttgaattttcctagttcaactataactcaagtgttcagagaaacaaactggctttacgcagtccacttttgtaattatcaacaatcatagaaaaggaactagtatatagctacttatttgctttgtttgaatggcactgtactttatcataacaatgggtgataaagatgataaaaatatccaagaaccacaatgctctatgtcagaactaggttgactggagaagaaatgctctctgaagcaaacgttctggatactcaaagactggatttgtacagtggtctttaggcgttataactctgtccaggtctctcaacacttacagctatcaaggaaactttattattgatattctacagaaaaaatcacgattactgcaagtctgtaagctcttaagtatttttcccattgaaattattgtttcattaatataatatattcaaccttgtgctatcttgggtatgcaactctacagttagagcagatcaaagggcagtagcctgaaaggagctgaatgacaaaatccatggcatttctcattagtcttagccagaagtggctctttatggagaggactcatcctggtcttgtgaagagaaatgcactgaaactggaaaggaatgagctggccacatcagtttcttcaaagctgccagttgatatgtctatgtctgcaagtatgacttatgcctgttaattaccccccaaactccttcaacagacaaagctctttattctgctgactttgaagtataatttggggatgccttgagaaggtcaacgcgacaggccagcttttgccctgcagtgggctgtgcaggtgtgtgctagctgttggcttccaggcctgttttattccagccctggcagagtttgcaggaatgtcatgagaagagatttataatactttctgattccatccagtttcaaataattttatgaataatctttctcatagcatactagtaattctacaagcagtcttggccaaaatcaacggagtgagcatgcttaaggaaataattttctttttcctttttaagaaatcattttgctgaagttttacaaacctcataaaaattaagggttggtttgaatttgggagaaagactcactttatctgaactcatttgccaaaaatatttaaatgagcacatgctggatgtaaaagtgccaaagcaatagcatcaattatgcattctcaaccttccagactttccagagtcattaaaaggcagcgttttcctacaggtgttaatgggatcctgcaaagaggaaggtggttttaggtaggattgtgacagagtggctcgtgcgttgggtgctatggaacccactgaggggcttctgaccacagtcccatgcagagccaacaatggcattcgttgttataagcaagtgtcagtcacaagagagctgccattacagagtgttgcccagctttccatattcccaacatggccagaggtttcattctttgagaatgtgtttattcagcctagtaaaaacattaaaaaggggaataaatctctgccgaccccaaaatgcttttcaccacagctgtaaaccataaaacatttagaaaggtaagcaggactaaagataatatagtttccccaagcagcatggagggcagacctggaggtggcccttgcaaagacagctgcagtgcacagagcttccctgcaaaatcattaagacagggacaggttctataaggtgctaaattattattagtttttttttaagttgagggagggcaataataaaaaacatgtgctcagcagcctgcttggccatataaaacagaaaggcctgtgactttaagtgttgtaaaaggggttaattgtcgatttctgaatgtggcaagtttactgatcttgttaacagcaacggggcatgtgccgttggttatcatggcgggaaagaaaaacagccatccatcccttattccctggatgccgttattagtcttggaacccaagttaagggacatatgggtgaatgcagtcttaaaattgctcctttccacctgtccaaatttctacccattctaaagcttccagttccacctaacaactgcatttttactgccatttttcaaatgcctgctgtggatcagttcctttcacacaaaatgtgttgtctatttgtatgacaacctaatggagtgggcaaggatgatacaaccattttacagacaaagcaactgaggttcagagaagttaagaaagttatctatggcgacagagctatgaagcagaggttcaaacccgtctttatattccaagtccaggtcttttcaactagttattcaaataattcatttgttcatccatttactcaatagatagttattggccatgcactaagagccaggtgctggtctagttgttgaggatagagccctggacacaactgacaatgttcctgccatcacaaggcctatagtttaggaagcactagtctaacttccaataaccatcctctcttctaacctactttcacatgcacagtcagcatctgtaatttgatattttattttgctgttgagtattgcacattacctttgagtatggtgtgttacctttggctcccccagctagatgatgagcctggtgaaggcagggctgttgtctaatatttctctttttcacagtctacccagcacaacccattaaataagtgctttttttctcctgtagaacatctttattactgtgatcttaagatcatttggggttttatttagagcttagctattgcagcttctgttattgagctttgtcaaatgttatgtttatattgtctcattagtgctgacaccacccaactataagacccattttacagtttaggaaattgtggcttatgagggctgagaaacttgcccgagttcttagagtcagtaagaagaaaagctaggattctgccagtggctgaattcaaaagcccaatttctgtataccatgtacttgagcctgagcagtgagggaatctttgcccacctgaaacatatagagaatatcaaaagaccctatgatatgatatacatgatacataaggtgaatttaataccagccattgattcatccagtcactccaatcactcagaccttcatagtaaaattcatgtggcatcttggctcctgccccaccctctattttgtggtcttcttaaaatgctatcttttttcaatagaataattttcaaaggaatccctgtgttcctagaaaggtgacaaatcagagattgactagcatgaggagggtagtggaaggttcacacctgtttgtaataactggcttatacaaaacgtaagtacgaacacaatggatggcgattgtgttctgccaatgcggttggcattcattctgagaaaagatggcagaccaaggccagagcatggcccagttgctgaaaatcagaaccacactggagccaccagggaccctggtaactaggtggagctgaaccatttatttctgttttgatggcatagtttccactttaagtaatgtgggcttaatcttcatttacattcttcaatctacacagaagtgtatttattattgtcttgtgataagcagtagtgttaatataaagcagtgctccctgaaactgcagacagtttccaaggtctgggcaaaaagaaacaaaaatgtagggaggggagccctgcagcatgacaagagtttttgaaaatgaaaaccaaaaaaattttaaagaaaatgaatcctaatccttttggaactttcatcagtcagtctgtcgacaaggaactgataatttctgaatgtgaagatttggataacaaatgagttacatgtataactaggcttttgctgggtttctctatgtagataatgactcaactggtgagtaccatcagagaaaggccagtacactgggtggcctgtggatgcttgtgtttatttgatgcaaggctcctgctttcgttggggattgctggaagagtgacacacaccaagctacatttctgccagttgtggttttgagataacaaggcttaaaatttgtatgccaaagttaaaattcatgatctttttcctgtgggcacattttagttcagtctctttgctcaaaagaatttgacaccaattattgcttttcagtactattgagcatgagacaatctatagaataatccaaaaaggaagatctataattatacaccttctcataaagggatcatggatattattgctatgtatgtccagaatagctcttcttacttttgaggagtaactattagagtcttaccaggtgccaaccacagtgcttcacattcttgccacagagactggtccaaggataggcagatgacaaaaccaggcaaattctaattcttccacaaatgttttctaatatagagctgccaaaattgctctcctgcattttttaggtgtgcaattgcaatataaatctgaaaatgcccatggccatgaaagatctggaaatgaaaaatagcattatctgattctttggatctagtcttccctgagccagctccacttttcccatgcatggggcgggggggtcggggctagcgagctaataaatatccttttattgcttaaactagctccagttctgatcccaccatttgtaaccaagtgtcctgagtgacataaataattaaatcaggcccagagaaatatgacccttagtatctgacaattaggagaagcatacaaaccataaattaaatgacataaaaataattcttatgcaaaagacagtatacctcaagacatgaagggttgttttgaaatccttggaaagcaatacagactgcagaatataattcttgtgggagaatcagtctccacagtgttttctgcagaactgagaaagtatcacctacctgccagagcagggctttaaaatgacaaatctggtttgttctggacacagtgatttttttaagaattttttttactatactttaaataataaaaatatattttcattgttattaaatattattataatacttttattggtattttaggagcattactccaaagatggtgagaaattattatatacaaaattgtaatgtgtttcaccttcagaatgctattttattttctcagctaatgattattattttagcaagatttgacaataatagtaaaataatcgaaccagtatttttttttttgagacatggtctcactctgtgtctcaggctggagtgtagtggcataatcatggctcactgcagactcaacttcccaggctcagatgatcctcccacctcagcctccccagtagctgggactacaggcacatgccacaatgcccagctaatttttcgtatttttggtagagtcagggatttgccatgttgcccaagctggccttgaactcctgggctcaagtgatacacccacctcagcctcccaaattgctggctttataagggtgagccaccgcgccaggcctcaaagcagtacattaagaactgttcgtgtaaataagctctgttgagggacattaactggggaataaagtggctggaaaggacacattgaactcctttttcatcttctctgaaaatgttaataataactgagacacatctctgtgtctatatctatacttttcataagtgaggaaagaatatgtgaaaatttggccaaaacttaaagtttttgaatgcaggaaaaggtttgttattcacagtggaacaggggaaatgtaagaagatgatacggtttggttgtttccctacccaaatctcatcctgaattgtagctcccgtaattctcacgtgttgtggcagagacctggtgggagataattgaatcgtcggggcagtttcccccatactgttctcgtcataatgaataagtctcatgaaatctgatggttttatgaggttctcattcccttttgcctgccaccatgtaagacacttggttctcattccctcttgcctgcctccatgtaagatgtgcctttcatcttccaccatgattatgagacctccctagccacttggaactgtgagtccattaaacctctttttctttataaattacccagtcttgggtgtgtctttattagcagcatgagaacagattaatacagaagtcttctgcatattgaagagaaaaagcctattgtcttctcaatgtccagatcaattgcatttattccaagtctggggtgtctcatggttcattcaaggaacactgacagtgagtcatgtgacaggccttgggaaaaaaacataattgtgttcataaatattattaagaaaagcagaggatctcaaaagtcagatttggatgaacattagttgatgcattgaaacatggattatgtcaaatatcccatggattctaagctgccttaattgtaaaaaaactctttgatgctctgcttagtacgtaagcaccttcaattgctgtcaagtgtacatacagcaacaattaaagataaacaaataaacatattgggatatgctgtcatcagagtacagggaaatgacccaaaagctcaatgtttccaagaggaaattagttccgaccccacgtggccattgttacagactagaatctggattttgtttgctcttgattacacagaggaagaaacaaaaaataagttgtcctggtgataagcaaatggctgggatggttttcctcagtgaaaatcaatgtgatgtcttattcccaggcctagagataggtgggagatggggagggaagctatttagtttaccagcattactaaagttgcccttttttccctggtggatttccttttcctgatttcagagcttagagaactcagttctgtctagaggccctaacattccacttcccacactcagcatgggcctattgtcatcatggacattttttaatgtataattcaagtaatcctcaaagcagccctaatagtttggtatctttattgttatcagcctctcttgagaatcagaaaagttaaatacttttttaaagatcctgtagatggttagaggcagctaggattcaaatacccatctgtctggatctgaagcctatctcttaatccccaaacccactgcaacatgcagtccattctcacatgtgcaagtgcatctaacccacaaatgctttttttaaaaaaaatattaaggatgagctggtggtgtttcctccataccccggccagtcacagtttagcatcatgggataagtgtgggaaaggtctgactagagtagaaatacagattgtgcccagccttaaaacaataacatgtttctttcacatttcacattaacaaatctaaacagctgatgaaatactgtaatcctaggattatataccatgaggagcctaagaacccctttttaatttatcaaagattcagtatatttgtaatcacatgtaataagtgaggttgctgatgtagaggaaaaagaaatgacaatctttgatcccattgtaccctgggatcccgaaaatcatccttagcctgctggtagccagtctggtctttggtgttcctgggcatgtgtcccattctgagccatgggaatacttcttctcatgtcctaccctctcacacataatgcccacctggtattcttccttctcactccacaccacactccccaactaaccacagccaccattatattctcttcttccctcttctccccttccctgcccttgcttcctttcttctccatgtgtctcttctcctactctgttcccaacataagatttagcatgaagccatgccttttctcctcaaaactgagtttctcaaagatcattcacctccatatccctgcaggaagcgatgggtatgagcagtgtctactagttggatggacagatcaagggatggatggggcttttgaccatgtgtttctttcaagacttgttgaagtcattttattcagtgaacaaatagccattttgatatcatttcttctcccctttcaaattacttattacaattttgggtgtgggtttatggtgggtggcggtagttgcccatgcttttggagctgagatgtaattcttccctccctccctccctccctccctcccttcctccctgcatgcctccctacctcccttcctcccttcttccattccttccttccttccagaaattctttagacaagcaaagaaagaaacttcacagagactttaagcagtttatatccaactatgtgactcctaagaggtgaccgcaggtggtttcaaaaatcttctgggaatgatcccatgttatataataatgagaacactgagcttgacatcaggaggcctggctttagctttggtctcccttttcagtatgcctggaattctgggcagatcacttggcctctctgtgcttagttttgtcatctgtaaatagggaaggtaggactaatgagtgatttttaaactgttcctgggagccctcaaagattcatggaggtgtcttgagagtctgtcctacaagggatgttatggtagagaaggaggtggttgcatagatcaggcagggctgagtccctcattcctacttcaacctgaattaatgttctggtgaaactttttgaatgtatcccatttttaagctttctgctagaaaacctactccaaaaaagtttgaaaactaccagactggattatctttaaggtgccttccagcatacctgacttcaatatataaattatctgtgtgtgatcttcctttacagaaataatggagcctttcttttcctcgtgtggttgttgctctaagaatgcatttcttatcaagagaataatctgcttttcattctgcttcctacctagctcaacagagcacaaaatgcccaagctagatcccttattcccctgtgaatatcttctgtttagactcatccatcatcggtggggcttatgacagacatagatgttttcacagttaccacacagggccaactgttttagtaagggtgaccacttaggacagctttgggctcttgagctgtcctctgttgaagccgggaaaccctaagctgtcatctaagcaacgccgggttgttcatccactttgaaagagacaactttatggtcctgatgacatttcctatattatattaaggatgcatcttgagaggatgtgttgggtttgttttctggacaagctggatgagtctctctctctttctgttttagccactgccctttgtagggtttgtttttcctgctgtcccagaatagatgacttaatgggttgctgaaaatgtccaggctgcctctggctctgggggtagctcggccttaacaatggaaggcatttagcagagcctcatgttttagagcaagaaagacttgagagagcatctcatctggtatttttcaagatgctttttaattttttaaacagcaaaccttttctttccccaatacaaatctgacacaaaacctcaatttataaaacagatttttaaaagaggggtgggaggtaggagaaattctaccaaatggtactttccttgctatttatcctccccccatactacctcctaccacacacacacacactcagcaatacctaagcacttctagggaacccttggcctcccaaaagcaatagaaacccccggtcctgaacctctttttttttgtttgtcaggaaactgaaaaacagtgagatacggtaacttgcctaagaccccacagctagagatctcagtgccagactgcaacacttctaaatctggtttaatcttcctctccacccctctctaatttattatgccacttcacctttgaaccctggaaaagggcaggaagaaaaaattatgtaccagtgtgctcaattcttgtacatctgtctttaattctcaaagcaactttacaaggtgggcattattattatgcccattttacagaaaggttaaatcacttatccagtgaaactcagccagaagtggcagaacttacattgaaagctaggcctatcaaatttcaaagctgttctttctactataccacaggattaaacaatgccaactattgcttgtcataaatgaaaccctctcttaacataagtttgactcaaaaagtctgactcataattcatgaaatactaagtaactcttcttaaataactaccatagactgtccctctccaaagttttctatgtctattgcaagcatgttttgcctttaacaaacaacacccctttctctgggaatcattctctgtcattcctctaccctatctcatccagaaactggggctctagaaaccatgattttgatgtttaattcaagtctggtcttgagtgggccaagctaggaatgaggagcaggagagagttaagacgtaaaattttactcactgtatggattgagcagtggaaagagaaccaagaagagagatcttgtgacaacttacatctccggtttacttttgcatttcagttcaatgaaacagcctacttaccatataatttagtctgccttttttttcctgaagctttggtgtttgtgtgtgtgtgttttgttgtttttgttttgttttgttttgttttgttttgttttgtttgagacagagtcttgctctgtcacccaggctggagtatagtggcacaatcttggctcactgcaacctccacctcttgggttcaagcgattcttatgcctcagcctcctgagtagatgggattataagcatgtgccaccatgcccagctgatttttgtatttttagtagagacggcgtttcaccatattggccaggctggtctagaactgctggcctcaaatgatccactcgccttggcctcccaaagtgctgggattacaggcatgagccgctgtgcccagtctccttcctgaagctttgaatttatgttactagcaaaccaaacaatcctactgactatatcatcaaatcggatggcctgaggattcttcaggtagattcaggctgccttcttgttgcagtcagtcatgcttattttacattcatatcatacagtgctgccatgattggagtcctcagcaatcagttattccagtcctctttgtttatactgaaacaagtcactataaaatctcctgttcacatggataaggtacagtatccagagaaagccaatcttctctagccttattgattttgtctcttagacttctccctgctggacagaaaatgtaaaataggaacgttcaaaataaataagccagggatactaagttcaattaaatagaacaaaatgctttatattttacaaacattaacttgagaagagaaatctaagttattatggtctccaaatggtaatagcccaaatttctactagcaataagatagataattatggtactatgtattcatacagcaaaataatatacagcaacaaaaagtaatgaattatagttacaggcagcaacatgggtgaatgccatgttaattcccatttgtgatagaaatcaaaataatagttacctcttgaagggaatgaccaggaaagtcataggggaggttcctgggtgccataacatttgatatctttatttaggtggtagttacagagctgtgttcactttgcaaaaattaattgaattctatagttatcatttgtgcagaattatgtatgtatattatacttcaattgtaaaagcttaccccaaaaatatctgaattattagaaattagacataaaacttacttcctctaggtcatggtctcccattatataaaacaagaaattaaactcaacattcttaaaactggaagtgatctaaggaagagtatctagttcaaacatgaaatgttttacagaaagagagaccgtggccaaagaagtaaagtgataggctataaattatgaagtttataattggtagagccaagattagtccttagatcttttagctatgttaacaaagatattctaaataaacctcttaatactattctaaaataatttgctctgaagtatacttttgtactaggaacaaagggtttgtaaaataaataaataatgtgaacaataccatcagtgtttgcatagaaacaatatgatatcattcttaaagataaaatccctttgtcactcactccatgagataccatctgatttggtttctgaaaattttggcaaaattatacattgcttgaaatctcattcccaggatgtatttgaaataaagtcttttttttttaattttttactttaaatttcaggggtacttgtgcaggatgtgcagggtttttacataggtaaatgtgtgtcatggggtttgttgtacagattatttcgtcagccagatattaagcctagtatacattagttatttttcctgatcctctccctcctcccactctccaccctccaataggccccactgtgtgttgttctcctccatgtgtccatgtgttctcatcatttagctcctacttacaagtgagaacatgtggtatctgcttttctgttcctgcattggtttgctaaggataatggcctccagctccgtccatggccctgcaaagaatatgatctcattcttttttatggctgcattgtattccatggagtatattatacatgccacattttctttgtccagtctatcattgatgggtatttgggttgattccatgactttgctattgtgaatagtgctgtaatgaacatactcatgcacatgtctttataatagaatgatttatattcctttgggtatatacctagtaatggaattgctgagtctaatggtatttctgtctttaggtctttgaggaatcaccatactgtcttccacagtggttgaactaatttacactcccaccaacagtgtatacgcattcctttttttctccacaacctcaccagcatctgtttttttttttttaataatagccatgaaataaagtcttgatgatgataatgatgatgatgtcaaggattctgacaatgtaaacaatgatgacaatggtacagtcttatgggtggtatgttagtttcctcatttgctaaattaattttttaatggctactctaaaaaagtagcacaaacttgttgactgtcttacagttttgaaagtcagaagtccaaaatgggcctcactggcctaaaattaaggttccttttggaggctcaaggggagaatccattttttttttgtcatttccaggctttagaggtgacttgcatttcttggctagcagccctcttccaaattcagtcagcaacagacagtggaatccttctgaacactgcatcattgtaacattctgactttctgcctctttcctccatatttaaaggatgtttatattccactggacccacccaaaaaattcaggagaatctccttattttgaggtcagctgattactgatcttaatgccatctgcagccttaattcccacttgccatgtaacatattcaaatgctctggggattaggacattcacatttttaggggcctttattctgtttatcacagacaagattgtatttatgcatttttgaaatacatacatatatacatatttcatatagtatatatatatataaggccttgagacaatgctttctttacctagaacaaagttattttgtcctaggtataattatttccattttaccaagggaaaaaaaaagaataaggtgaagcaaattgcctacatttctggagctggttatggcagagccaggactggaagccagatttccaaacccagtgttctcattcagtgaaaagtggttttcctaaacccagctgtcatgttcctcaagctccagaacctctggagggtgagctgtggtggacaatttgagaatttaggtgggttttgtttcagagattgaaggatttgagagatgaaggattggcagttgctgaatagtaagtgctagtccatggacaaatttatgcaaaaggctgcgttctccgtcaatttacacacaattgctactcatctgtaagacttagcatctgcctcacactcccctatatttaaccctcagcctggatcatgtgcttgtcacaaatcaatatttctgccactcgacaggaacttcagccctttcaaattcgttccaggtaatttgaggagactccagggcagtgatgaaataaagtgaaagcccctgatttactggatctggaggcttgtgctgtgagtgagaagtgagggtgaaagacccttatcacaagtatttgtgcttttagatgcactgagtccccacccagaggtaggctccctgccaactcagtcccaaaccccctctgaaatggggaagaaggggcccgggctgtgcagttcaggtaccacaaggtcttcatttgtgcttgcagcaaatagaaaagcatgtttctgacttggcccctagtgtgaggtctggtcttggaggttccgcggtctctcttaagactctcactggctcacctctgctgcccctccacatgccagaattctcaggcaaactaagcttaagcacaaactagggctccagtgcagcccagaacttaaagcactttgctaggtgcagacctggctttggtatgagtctgtgtaatttgtcccatgttgtcacagttgtcagtcacacctccctgtttatagtggttccagggctttgggattcttcaggatcagtcctgcatagtccagccagaggggattactgttccccaaggtactacaggcctcttctttcatcccagctgactgtggggcagaatcagctctgtgatattgataaagaactgaaatagatccttttagacttcaggacttcatcagcctgaaataattttctcagtactaaataaatagttgccccaacaatgatgaaaaataaatatcggggctatgggtgaaataagttgctgaaggaaatttaatgttatcaataatataatggaattttgccctgttttacagttcataaagcactttcacacatgttattcatgtcatcaggaaatgtttactggcgggccccagtgctggagatacaccaggaagtgaagcagagattgtgttctcgcaggccttcttctgggattataaagtggggctgctgaggagtgaacctgtaatcttacacattagcgtatactcccaccatggagccatatcctgctcacagtgcatgtcatcacaaacaactccccgaggcaggcaagactgttaatactacctccacatcagggatcaggcaattgagcctcagagtggtgaagaatcttgccaaagccccacagattgatatgttaaatctgtgttcagttctggcgatccttccaatatgctggtttgttgcaaagcacagtgcctggtccataggaagccctcagtaaatatgaatagctgctaagtgctcagtcaatgccacctgctattatacttgtcacggtggtgtgagaaggataacaaaagtcatcggagcatctgaactcatcagaggccgccagaggaacattctgctccagagcatttgtgttccaaatggaaactataaaagcaaaaataaaatgtttatattttctagttggctgtaaataaagaaataatgataaaaataaattagttgcctgacctaatgctttaaagtttgcagattgagtaatgtctttttccgacagtaaatttagttaacagttatttgtaaaataattaaaatttcaagtaacacatgctcattttgcttaactaagtttgtgggtttattgttgaaaataaagatcaaataggccgggtgcagtggctcacgcctgtaatcccagcactttgggaggccgaggcaggtggatcacaaggtcaagagtccaagaccagctggccaatatggtgaaaacccatctctactaaaaaatacaaaaattagctggacgtggtggcgcgtgcctgtagtcccagctactcaggaggctgaggcaggagaattgcttaaacccaggaggtggaggttgcagtgagccaagatcacaccactgcagtccagcctgggcaacagagtgagactctgtctcaaaaagttgagtttatttttcagctaactggctattttaaaattttggaaaaatttaaaaatattacaaatcatacacaatagatgttgagttaaattcaattcagttgactttattgatttggtattttttttaaaaaaaagttgaccatgtgtggtggctcgtgtctgtaatcccagcactttggaaagctgagctggaaggatagcttgagaccaggagtttgagaccagcctgggcaacatggcaagacctcatctctactaaaaataaaaaataaaaaataagctaggcatagcagtgtgttcatatagtcccagctactcaggaggcacaggtgggaggatcgcttgaacccaggaggttgaggctgcagtgagctgtgatcacaccactgcactccagcctaggtgacagagaaagaccttgtctcaagaaataagcaaacaaaataagcctatcagtaatatccccaaatgttaataattgataccttgatttaaagatagtgatatctatttactttatatcagcatcacttaattttgataaatactccaagccttcattttgtttttaagtaaaagatgtaaaactcatctgggaatatatcaaacccctactagtgcctgccctcaaatgatcaagcctacacatagctgagtcgtaacaaatgtgttttaagggaatatcaagcattagcaatctacccaccacaggaaaacatctaattctataggagtcaagagttagtcctcattctaaatgcagatactctggggtgtgtaattcaacccatgtaagtgccccctctgtgcctggaccatggaatagatcgttcataagattgctgcatctcaggagacgggtcttttcaggagcactggatgattaggccaagttacttgggaaagccagtcactgtatttatttttacaagccagatgctggcacgtagtgcattcttttacaaaaataaaagggatttggagaaaaagaaaggttcagggtcacagatgaaatcatgagggtattttacatggttttatgggtagaaatttttacttttaccttctacaatggttctaaaaaagccgttgagctgctctgtgcagaaagtaaacagggaagagttttatgcccacagtagagtaaaaaccttaaactgggacatcaagggactccatgcctgaggccgtggagaggctaatagtgccacggggtagggaacaggggagtctctgttcaccatggtcctgtctcattcctaaggagtctttgggagcccatagttaagctgttttgataaacactaagtaataaccagatatggacatgtggaattgattaagagaggagggattaactaatgcactaaataacccatcatgcgtggtgggttggggaggaggtagagacataatggtacaagctcctgacgaagaagggccctgagattttccttcagcccacagatatttactgagcacctactgtgagccagctcctgttctaagaacgaaggatatgacagtgaaacaggcacaaattctgctctattgcttgtggagcttacattcttgagggggaacccaaggatgcttaagaagagacagaaatcacaatgagtagaaagagagtgatgtggtagaggttgctactttacatgggttgattagaggaggcctctccgataaggtggcatttgggcaaaggcttgaatgaagtgagagagtgagccatacgtttatctgagagagaggcagataattccaggcaaacgggacagctaacctaaaagctttgtgacagaatcatgtttggcagaatcaaggaataaaaaggcatcttagaaattgcttgggtaatgctttaagatcaattgtcatctcctttcaacttgttacagactcctgcttttaggtgtatgctatatagttattggtcaaacattaagagctggtccccattaataactataacacttcctgtattcaggtgatgagaaaaagaaggtcctgctctcaagaggtgcaaatagggctggggagaggtctggagagaatgagagacagaggcaccaatagctaagtagactagaagtaggtagcagaaccctgacctccacatttctcctgtttgttttaacagctccgcttagcagcaccacaagaaggagcgtggaaagtatggaatcagatctgtttgtgcggtttttacatttcaggcgattaagtgaaatggtaaatgaaaccaaatctattgcctctatccctgtcagtgtgaggcaaagagggaaaataaacttcaactcctggtgtagacagtggaagggtgagacaagcaaacccagctccttcacacccacttcctttcttctcacaaagagaagtccctctcagtccctcagagcttacattgatgtgtccagagagggaggttaaggaaccctggagattcattgttgggcctcatagctgtgcttttattcacctgtcttttataaatgtccactgtatgccagcattgtgctggtgatacaagtgctgtgatgggaatatgcacaaaggtgggcttagaaaaatcttcctgaagaatgcaacaggtatctatctcaaagccagacaagtagggtttgatcgccttcgcttttttaaaacagttccttcattgttaatctgctcaattcatctccgagccatggtctagggcaggatttttttaaccttgacacttgaacctggataataattccttgttgtaggggctgccctgtgtattacaggctgcttagcagcatccctggcctccacgcactggatgccagcaacccctttctccccaatttcgacaaccaaaagtgtctccagacagcgccagctgtcccctgggatgacaatcacccccctgttgagaatcattggtccagatgaggaagtcccaggccaggcctggtgttacttacaaactccaggtacacaagaatgaggctcttcttatgaacatctggtctcattttccactgaagtttgaacaataggaaacaggctaaaaaagcagcaggaagatgttaggttcgctatggaaaagaatttcctgcttaagaagttagtaaggactgacttggcgatgtgggctcttttttggttccatatgaactttaaagtagtattttccaattctgtgaagaaagtcattggtagcttgatggggatggcacgttgtgcacatgtaccctaaaacttaaagtataataataataaaatttaaaaaaaagttcaaatgcaaaaaaaaaaaagtaaggaactagaaaatctcaatgcaacatttataaaatatcctctagatatgtgagtgaaacaaaacttcattaagctgcttatttaaagggaaagttaatctgcagtagaggacaaagtcagaaatagttgctttgtttcttaaaaaatatataattgccatttcaatatatttaactgcaattatcaattaaaatttgcctgaaatggttggtgatttaaaggtgttttctgaggctttgagaacttagtatattaactgaatgtgaatgactttcaaatgagtccttataagtagtatgttttcataagtgaatacacagtgttctctaaataactgtggacactgttaatttttctgtattactgaaaatatagatttcagttctcccattatctgaattaacatgactccaagttagttgtgtctcacttcaccttaaaaaaaaaaggtttctatctaaaaggagggaaagaattaacattcattgaccacccatttgtgccaggctttgggcaaggtcagcagttctctagtgagggggattttgccttccagggaacactttgcaatgtctacaaacatttttggttatcacaactggaaaggtattatatgagcatctagtaggttaaggccagagatgctgctaaatatcgtacagtgcacaggccagctcgctccaacaaacaactctccagccccaaacgtcaatagcgctgagattgagaaactctgcactaggctatatatctatgttatcttatattacccttaggacatttcttaaaacatctttactattattatcccctattatagatgaagaaactcaggcttagaggggtgaagcaacttgttcaagatcctaaaactagtacatagaagagtcagggttcttatccacaccctaggtgctgtgggcagctgtctctaccacactcagctgtcctcttgtaggtggtttttaatttattatcattattatttttacttaaagccatgtgtgacaggactttgcaaggaggatgctgatgagtccaaaggaaaatcacaagtgtgcccagtcctctactaatcaatatagcatgaagtcatatacatcctgtcccctcatgggtaataaattcttttttttttttattttactttaagttccgggatacatgtatagaacacgcagatttgttacacaggcatacatgtgccatggtggtttgctgcacctattgacccgtcctctaagttccctcccctcacccccacccttcaataggccctggtgtgtgctgttcccctccctgtgtccatgtgttatcatggttcagctgccacttatgagtgagaacatgtggtgtttggttttctgttcttgtgatagtttgctgagaatgatggcttccagcttcatccatgaccctgcaaagggcatgatctcattcctttttatggctgcatagtattccatggtgtatatgtaccacattttctttatccagtctatcattgatgggcatttgggttagttccatgtctttgctattgtaaatagtgctgcaataaacatatgtgtgcatgtgtctttatagtagaatattttatattcctttgggcatatacccagtaatggggctgctgggtcaaatgttatttctggttctaggtccttgaggaattgctgtactgtcttccacaatggttgaactaatttacgttcccattaacagtataaaagtgttcctatttctccacaacctcactagcatctattgtttcttgactttttaataatcgccattctgactggtgtgagatggtatctcattgtgattttgatttgcatttctctaatgatcagtgatattgagcttttttcatgtttcttggccatgtaaatgtcttcttttgagaagtgtctgttcatatttttcacccactttttgatggggttatttttttcttgtcaatttgtttaagttccttatagatgctggatattagacctttgttggatggatagatcgcaaaatttttctcccattctgtaggttgcctgttcactctgatgatagcttcttttgctgtgcagaagctctttagtttaattacatcccatttgtcaattatggcttttgctgcaattgcttttggcgttttcattatgaagtctttgcccatgcctatgtcctgaatggtattgcctaggttttcttctagggtttttatggtttggggctttacatttaagtctttaatccatcctaagttaatttttgtataaggtataaggaagggtgatccagtttcagttttctgcacgtggctagacagttttcccagaaacatttaatgaataggagatcatttcccgatcgcttgtttttgtcaggtttgtcaaagatcagatggttttagatgtgtggtgttatttctgaggtctctgttctgttccattggtctatatgtttgttttggtaccagtaccatgctgttttggttactgtagcctgtagtatagtttgaagtcaggtagcttgatgcctccagctttgttctttttgcttaggcttgtcttagctatacagggtcttctttgattccatatgaaatttaaagtagttttttttctaattctgtgaagaacgtcaatggtagcttgatgaggatagcattgaatctataaattacgttggacagtatggccattttcatgatattgattcttcctatccatgaggatggaatgtttttccatttgtttgtgtcctctcttatttccttgagcagtagtttgtagttctccttgaaaaggtccttcacatcccttgttagctgtattcctaggtattttattctctttgtagcaattgtgaatgggacttcattcatgatttggctccctgcttgtctattgttggtgtaaaggaatgcttgtgattttagcacattgattttgtatcctgagactttgctgaagttgctcaccagcttaaggagtttttggggtgagatgatggggttttctaaatatacaatcatgttgtctgcaaatagagacaatttgactctctctcttcctattagaatatgctttttgtctttctcttgcccgattgccctggccaaaacttcaatactatgttgaatagagtggtgagaagagggcatccttaccttgtactagtattcaaagggaatgcttccagcttttgcccattcaatatgatattggctgtgggtttgtcataaacagctcttttattttgagatatgttccatcaatatctagtttattgagtttttaacatgaagggatgttgaattttatcaaaggccttttctgcatctactgagataaccatgtggtttttgtctttggttctgtttatgtgacggattatgtttattgatttgcatatgctgagccagctttgcatcccagggatgaagccagcttgatcgtgatggataagttttttgatgtgcgggtaataaattcttagcacacgggtacagtcttttgtttcactttgttttcctcgttattctgtaaacctgccagtttatgcacgtcaaaggtctagaagaccttgccagttcctctgtccagagtccccaccctgccactgaggagtagcatgcagtttcacaagtcgtgttaccccaagagcttcggtttcctcatctgtaaaacaaggatgataacactttcctcacatgattgttgaaatgatcatagagtaataataatagtcagaggtacaatttattatgtgtgttatgtactgggcgttatattaagtgctctacacgtattatctcatttaatttttagaataaccttttcagtagttgttgcccccattttgcagacgacaaaagtgaggcactgagaggttgtgtaatttacttgagtgcaggtggtcagtaagtagcagagccagcatttgaacttagaatgtctggctctaagcctcagactctcttaaccacaaagctctctgtcaagtgctatacaaatgtgagaattattatgagcaatgatagctagtttaggtgattaaaaagctttatgtgcttcagagagttttcacagggtaatcatcataaattcctttttcatcgtctttgctgttccatccttgtgatcattatgcagtacctattatgtttcacctttgtgtttttttctttcttttcacaagtttaaataagggaactaggggtcttttttttaagtcaagctttgttaatagattttcagaatgcacattaaagtgccagaaattgagtgcttttctgattagtaaagattgtattggtttttttttttaacaattcactttttagatttctattttaagcccacttagagctgattacaataacccctatttataaatagaattttactgggcctcacctctgacgtattttcaaattcagtctcactcactctaagtaaaataatcattcatcaagtgaaggtagggtagaataagagcatatttctgcagctacctctgtgttctgagggagccagccataaatattcagcatcggtggtcagagtttggctctgcattaaatcataatcattttactggtgaataaatgacatgtttaattattttatatggatgtataaattttggtcttgatctgggcagcatatttttaacatctggatttttttgttttcttgttgtgtgtgtgtgtgtgtgtgtgtgtgtgtgtgtgtgtgtttaaatcactgtttaggctgggcatggtggctcatgcctgtaatctcagcactttgggagaccaaggtgggtggatggcctgaggtcaggagttcaagaccagcctagccaacatggtgaaaccccatctctactaaaaatacaaaaattagccaggcatggtggtacatgcctgtaatcccagctactagggaggctaagccaggataatcacttgaacctgggaggcagaggttgcagtgagccgagatcacaccactttactccagcatgggcgacagagtgagactccatctaaaaaaaaaaaaaaaaaaaaaaaaaaaaaaaaaaaaaatcactgtttagctttaagtgctaggacacaaaatgtgaagtcactgtggtctttaaaaatctcaattaaccagaacattcaaattgctgggtgtattcaacactccacttctgggataaagagttaagtgacaagggcagagctggccgtgggaatcactatggggctcccagtgcctaggcaagtcaggttgagtgagcctccactccacccatcacataacacacacacacaccaatacaacattctacaacaaaaagttagcaaaagagtgttcagcaatgacagtctaaaatggaaaagtcagagagatgaagtctcaaagggacattctgtattctggagattatgtgtagagagatacagaagaaagtcatttggcaacaagtttcaacaagcttctgttatatgggtcacccttacagggtcgtaagcatcccttgggggattgttaaaaataatgtttaggaccctgtcctagtcctactaaatccaaatctccagaaaacccagggaaaatgatttatttaaagggccacaggtatcttggacacaccccagagctactgaatcacagtctctagagcttgggccaggaatcggaatgcaaaagaagctccacaggtacttctgatacaaacccccggcttagatctctgggggtggttcctggcaatctgcatctttagtccatcctctaggtgtgtcttacagacaccccagtttgagagacatggcatcaactattgttctgagttttatcagagcagaggtagccaaatcttctagaccttatagatcagctccgatgcacaagattggcatgaaaacagcttacattaaagtttacttaaaaattacacatttcctattaattttaatcttcacagtcttatgaggctgctgtagctggaattataagtgaagaaaatgaggttcagaaaggataagtaacttctccagggtattttctgagcactctgagcaggtggcagagtttgggctcaaatcacatctttttgactcaagccctgagctccattcctgcacttatgatgtggtgcacagtgcctagatagcactttcacacatagaatcttccttgtgctatagaagagccctgtaggcaaagttacttatcctttctgaaaaatcacaatctcggctcactgcgacctcaacctcccaggttcaaccaatcctcgtgcatcagcctcccaagtagcttggactacagacacacaccagcatgcccagctaatttttgtatttttttgtagagaacagggtctcactttgttgcctagactggtctcaaactcgtgggctcaagcagtcctccgctctgccttccaaagtgctgggattataggtgtgagttacctcattcaggccctcctgccttccttttattatatggtagggtgggatgggcaggaatttgttgtcttttgggggcttctgatgtccgaatgtcttattaattagccctaccaacagacacaactcagaccagagctaaccctgtcaatttagacatcacttcctctaggaagcctttgctatatccctccagtaaaggtcacatgacctcctctgcacactcagtctccctgtctttgtccatatcacatagcactatctgttccatgaggccaggtattgtccatatgtacaataggaacataactcttaatcaaatattcgtggagttgatgaacaagtgcagttagaatcagtggataaatccttctaatattcaaagcaatgaaggcagctcacttttctcctatgcctattctaaaatcaaattattcttttattcatattgtctgttttaactagattttatgtgcataagtgtattgtaaagtgggaaggaagaccactagaggcaagtacttccttctccatttgatgatgaggaatctgaaggtaagaggcagcaagtaacttttctaaggtcacacagcctatcagatatagagctgggttttgcattcaggtcaattgaacattgaaccctgaggacaggcagctggtaagtatcacagctgagattaaaacgcaagccatctaattcccatcctcatctttcttctgcttgcttcctgcctaaaaaacaggataacaaaggagggttgtttctgtttgtaatttcaaagttagtactcaatatatcacaagggtctcttaaatcatacagtgttcattacctgcatattccttgtgagagttaagctttggtcttcctcattttaccagatgggaaaccaaggccaggaagtttcagcattctcaccagctcttcagaaagctcatgtatcttggaagcagaatgcaggatggtgctggaggggctgagagtaggtaggaaattaagggactctgttaggagcagtggagtaaagacctttaacttgaaaccatttaaaaaatactttcataccatatatttgtgagcccaggtaatttctgaatttctgatccaaatcttttcctccaaaatgcctgctaagaaactctagaggtcgggggtgaagcggggagggagaaggaagaaaaaaaaaaagaaagtacaatgattccattcagaaacttggtccaaatccttgtctctttcttctatcagaaatcctctgttgtcagtccctggcatcacctagagatttccttaccagcagcattcttatgtttttactaaaacttctcctagaagagcatgttttgcttttaggagccagacttaagaaagtgcatcagcttaaaaatacatttgcttgtaatttttgtccatgctgccatctgacaggatttgaggatgcttccatttctgccaggataatagctttgttatctgctgagatctgcaatagctcgacagcacaggaaatctgtgtctcagccccctgctccaagtttagctcatccattacctaaaattgggtttacacaaggaaaattactttagtgctaatccagttgacttgtaaagtaaatttagcttcctcgggttcctagtcccataatctaaactgatttcaacaacagctttaggagtcctcccacacttcttaagaaccctcaggagcatgggtccccagcaagctgaccacagctactagtcatcttcaagccagtgatgtttgctgccttggtacattgtccgtggctccacaattacacactggagggtagggctgggagtagtgggagaagatagccttgggctattcatttcacatttctgtgtctccgtctgtaaaatcctggtaacaaatgaggtgccacatagagggaaaaagtggaattaaatgttttgaacccaactcacagaaaatctgtggagtaaaaagctgattacaagtaacaaaatcttcctttttttctcccttgttcctaagtgttagacctgggttcacttgccacaacttataaaccaatcaaatgtgatgatgtttaagacttgcttacagtggtttccccaaagctaatcaatgaaaagtccttacattccacaaactagtcagctttgcagcaacagcctcaccttcttggggaggcacatgatgtgagtcacacaattttcatgccagcccagagcgttgggtgccattacaaagccatgggtgtcttacatgaatgggagcctcgcggggggttgaagaggctgatctgatctgtggttcctcaattcagaggacatgagcttttgaaaataggcctttctaggtgaattggcctgcatgtcatagtttacacatactgagagctgatcatatatcaataattgttctaagttccattgtgggtgagtgctattgtgatgtgctattgtgtgtgtactattgggtaagtgctattgtgatgtttatcagatcctcatcataaccacatgaagcagtaaaggtattatctccaactggggcacagaaaaaaaaagttaacttgtccaagtcacatagctagtaagtggcaggcctagaattccaacccaggcattctatcatgattactagtggccacgaatcagatgattgtagtaacttgtcctggacttgggagatctgtatgctgactcatagagccctaacagtgtcttaattgatacgcccagtggtttcttctcagtcaccagtgaactttgtagaataggatgcagctggttaccctttcatagcatctttcacccttttttcccacctctttgagactctttttagtgtgctttgttgacttctcttcctctttcaacctcatatttgtggattcccccacaagtttctgtccctgcccttcctccttccctcaccatctaatctcacctgcatacccagtgtgctcatcaattcttataggttcaactggcagttctataaggatgactgaaatttatcagccaaccctgactcttttcccgaatgcaagacctgcatttccagcctcccattggacatttccctatggacagcctgccagcattccctatttcacctctccacattgccgcactaatttgcacagtagccagtacataataagcatgtgataaattggtaatagatgaaagaatgcataatttaatgaaacagttgccaccttccatagatttaatcttccagactgctcttacctaagctactttcttccgtttttctgaatcccctcacttaaccctgctctcaggtgcccctcaacctgcatcttttgtttctctttgttctggtgcctgttttcttctcttctacactcttttatagttatttctgtaaatgtcttttctattcaagaatgtgcatacattaagggaagagattgtattttcttcattggttttcactaaatagcctaacaccgtgcatttcacaaagaggcacaccatatctatggaaagagtgaatcagtgaaagtagacatagcactctgcagtttacaaagggcttcacaggtaccatccctatattctgcagtaggccgaagagatagccgttgagtcattagccccattgtacagatgaggaagctgcaagttagtgtggtcgttaatggtccagaatctcactgctcttaagtttccaagccattcttatgattttaaactggaaggcagatcatcccctcatcatgactttctcccccatgtactcgggaaaaatgagggagagagacaagagaactttggggtgaaaactcacattgggaacaattacaagtgtgtctgatttggtagcttggatgttacaaccactcatcaattttcatgtggcttcaaagaccctcatttgaagctcctaagagcagctcacttcagaagagacccaggtaccaatttattctggagagttccagtgtttcgtcctaaaaaaaaaaaaaagaaagaaagaaaaaagaaagcataaagtttaaacagatccaaggatttttcttttggaatctgacagatctgggttggaggcccaactttaacatttaacaatcgcctccctgcccccatttataaaatgaagataaaaacactcttactcgtggtgatatatgtggattaaaaggataaattttaaagtgcttggcatgactcctggcatgggaactcagtccattttctccctctgcccctgaattgtgcctctgcctttaactccttctatatgtgggaccatgaccggtgaacttggggccaagatgagcctcacctaccaggggtagagagtagaaagcccaagctgatgactgaagctggaagtgtcagcttcttgcacaattgctgccctcttagagctgcttgaggccatctcaacgtgcaacatgactgacatgcagttaggtcattgaaatcacaccatcggaattcttcagcttaatatgtcgcttcttagaaagttaatgcccttttgatactatcagtatgaaatgttgagaagcaaaagctcaaaggcttaattttagaagagagagagcagtttctaaaggagtgactgatgggagagagactcagtagttgactatgcaaaggtgcccagggcaggtgtgaacaacaaagctggcttcctgatacaggtagtactgaaagaaccccggctccacagccctgcagcacctttaaagaaagggtgagggagacatgcttaagcatttttttttctgctccacaacagggcccagggtattgacagtgctgacagaacaactgagaagttgtttaggttggcattaacaaacccggcacattgccttttctgattgacacaattcaaacgggtatcaactgcctttcagtaccactgagaagtggtgaacgatgagggaatcatagggccatccaagtgcattcctagcagggaccatgaatcagccttatcttgtcccacctcctctttacacagggaggtaagccaaggctcaggacatcatcagatatgtgataaatcctccattaactggaatagtcagttaacaagacttgtttgccttttatattgttatagtccaattttggttaagtagaggtaaaataggtaaaaataagatggttgtttgtttgcttgtttttgagacgaggtctcactctgtcaccaggctggattgcagtggtgcgatcatggctcactgcagcgtctacctcttggactcaagcaatccccctacctcagcctcccgagtagctgggactacaggcacgtgcccagttaggttgggattttttcattgaagtgattttaagtaatatgtacagtttcacatctggtaccttgctccaccatttactaactaggtgaccctggacacatttctttatttttatttttataacttgctctgttgcccaggatggagtgcagtggtgcaatcatagctcactgcagccttgaactcctgagctcaagggatcctcttgcctcagcctcccgaagagctggggctacaggcacatgccaccatgcctggctaatttttaatttttatttatttatttatttattttgtagagacaggtcttgtcttattgcccaggctggtcttgaactgctggctttaagcaattctcccaccctagcctcccaaagtgcatttcttaaattcttatatatgcctcagtttactcatctgtataagagggtaaatagaacttacctcttatggttgtaacgataaataaataagataaagtatatatatgtgtatatatatatatcacttaaaaagaataagcactcaatatatatttattttattaatactgctattatcatctgcttttgctctatctctattcctgcctgatgcacctgaaggttgagcggcattgtaaacagagggtggcagcatgagcttaggcattgtgtggaactggatgtgaacttggggaaattgcttcattctctaaacctcagtttcctcatctattaaatgggaggagtaatacctgcctctgcatgattcttgtatggaacaaataagatcatatttataaagtgcttaatacacacctgccaataaatggtcaacatgattatggttagaataaggattctaaaagcattataaagtgccggatcatgaaagatcgtagctcttcattgattcagtatttatctcttgagtacttgctttatgccagatacagagtttggcactggggacccagatttacaatgtgttgaaacaaatggaagtttctcgtgaactcttggtcactaatgagatgagaccatcccgttccaccgcactttcaagttaatccatgctcttctatagaatccttacattccagctgtgggatggctgtgtctcatatctcctcagatcaaaaagcatttctgcgaacagtgatattgaacattaaactggctgcatcaaacttgaaaggatggggcggtgattttgtgtcacaatatttttaacattatgcctggcgaatgtgcacatgttagatataaaggaggtttccaaaggggaagctttactacttggacttttaaattgccaggctgcattcttgggaaagccacataaaagaatacccctttttaaatgagtattacctcaaaaagtatagctcttttacgaaaggaatatgttgttctgaagccttgtccttgatgattttactgatattgtgatggttatttcaactaacataagaaggaatctattagataacaaacattcacagattgcctctgcttgctgggaattacatccagcagcttgaagagctgggtatattgaaaggaaaagggcgttttaaatgtataatctactcttccctttggcaccaatccgtgtagtgagacaacacttggctgggactcgggatctggccctggcttccattctgccatgactttgagaggaaactcaagttccgccttctccaggaagttatccctgaccaccccagcctacggtggattttcctgcactgaatgtgttacacttagattccatggtatatgatttaacacatggcctctcatatgaaataacatatgaaatgttatttcaacattttatatcttgtctctccagaaacgttacatgctccttgagggaagaaatcaagtctaacctgccttttgaaccctctatgtagtgctataaaataaatatgtcctcaaccaagtcctgattgactaagaaaaccagtgattggtcaatgatgttactttgtcttctgctaaacatttttggggcaggggatagaggggtgtgggagaatgggagttcaactcagaggaaacttagtaaagaggaaaagacataacagacctggtattgagtccccatctggccaattaatcaccaagttatcaaataaagcctatttgatctcttcgacctcattttcctcatctttgaaatatcttcctcttagcatgattttgaggatcaaatagagataatatatggaaaattctttgtatgcaggagcccactttgtaatgttattcattgcttcaattttcaatttggcttgggttaagaaaaaaagtatttttttttctctcaaaccagtgagcgggggaagaatgataaaaatcacattttctgaaattactctagcttatgtaagaagtttgatctgccagtatttgcctttttctcacatcacctgctgcatgccacacacctgatttgtctgttgtgttcatgtaggattttgtagctcacaaaagcattttcacatgcattatcatacaaaaaccctgtgatacaggcactgtggaagtaagtattcccatttcattgatgagtaaactgagactcacagaggctttaaaaatgccccaacatcaccctatcaggctgacagtgcctgccttcctccagccttgtcctctttccacaacaccacactggttctcctgtacaaatattaggcagctcccacaagacattctcagtcacaaacatgatcaccatctacttcctagtcaaggagatcagttcacgcattttgtcttcatacaaataattaaaacagggactgggtaccttggcccatgcctgtaatcccaacactttgggagttcaaggcggggagatcacttgagcccagggatttgagaccagcctgggcaacatggtgaaaccttttctctacagaaaaaacacacaaaaattgctgggtttagtggtggcacttatggtcccagctacccgggaggctaaggtgggaggatcacccaagcccagtaggtcaaggttgcagtgagctgtgattgtgccacagcactcctgcctgggtgacagcatgagaccctgtctcaaaataataataataattaaaacattcaagcaagatcccattcagtttataagtcattaataattcataataaatgtaaacattgtaagcctggcctttctgtatttagcagtatagcaaaatggttaagaattagatggacctggccgggtgctgtggctcacgcctgtaatcccagcactttgggaggccgaggcaggcagatcatgaggtcaggagttcaagaccagcctggccaacacggtgaaaccccatctctactaaaaatacaaaaattagctgggcatggtggtgcatgcctgtaatcccagctactccggaggctgagtcaggagaattgcttgaaccgggactcgggaggcagaggtagcagtgagccaagattgcgccactgcactccagcctgagctacagagcgagactccatctcaaaaaaaaaaaaaaaaaaaaaaaaaaaaagaattagatggacctgatcctaatgctcgttctgatgctcagatcaaggggaaaatgaggaggctttttaggcctcggtaaatcagagttaacaacacccagttaacaagcccagtgtcacagtgagagtgaaatgagataatgcatatatagcactttctcctccatgtgactcatagataaaagctgttgatatttcaactgttctgggctatggaaattttaaaagatttcatgtctaggtgacacgtgaaagtccagcacgtggaccataaatgttgtcatggtttgacagtattaatgaaacacttcatcgtgtgtcagccagcctcaccttgacaggtcatctctggctggcgtaacccaagggccaatgtgaaaaggacatttcactgaggacatgatggggttgccttgtttttcttgcttcttaaagagccatttcaattaatttttttcacacataatcctgaccccttggcctcccagtagaatgctatacgtgcacaacaggaattttggcgtttattgtttatcctctgggggaatgtggtcccccttttactgcctttttcagcccactccccccagttgaatttttctgagaggcagtggaagggaaagtatatacccccatagttgtatttttttatccttattcacgattctcaacagctttttaaaagtgatggctggcagccaggtacagtggctcatgcctgtaatcccagcactttgggaggctgaggcagaaagatcatgaggtcagcagttccagactggcctggccaacatggtgaaacctcgtctctactaaaaatacgaaaattagccaggcgtggtggcaggcgcctgtaatcccagttacttgggaggctgaggcaggagaatcacttgaacccaggaggtggaggttgcagtgagcccagactgcgccattgcactccagcctgggtgacagagcgaggctccgtctcaaaaaaaaaaaaaaaaaaaaaaagtgatggctgggggcctatagtctataatctgagctgacctatatccatggcacatgtgttaaaggtggaaccatagtaggtcaggacagccatgtaaggtgtaggtgataatatcctgactttggaaatgaagaaatggatgcttaaatggctaagtaattatttaaggccacatgggtaagaaagggcagagctaggatttgaactctggtttatttgattccaaagcccttgctcttggatgctgtgacttagagattttcaaatgccactttcttaaaaaggggtcttctagaaataaaaacttttaagaaaaggtgaactttcaatggtggaaatgtgtgtattgtggcagtccagtcaggaaatggtgtgttatttttgagaagcaaaaccttttggtggttctcgactgttctccaaagacgcaatgtgcactgggcctccacgtagggaactccctttgctgagtctttaaaggaacctactggctgatgatgattattattaataaagtctaatatccagagagcaggattctttcccatgaacaggaccatggaaagcctggagttgggggaggcctagggagtcaacaatacaaaggaggcagtaggttcatggagagcgctgtgtgggggcacagtgaggaattgctacggggagcctaaagcagcattgtccagtggaaccacatacgtcatcttcagtttttaagagctacattttaaaaagtaaaaatgaatgaaagtaattttaataagctatttttaacccaaagatccaaaatattttcattttaatgtgtaataaatataaaaatatgaatgagatattttactcttttttttttctttggtactaagtctttgaaatccagagtgtattttacacttaccacacatctcagtttgagcccaccacattcaaatgctcaaaagcaggcacgtgtggctagttgctaccatactggaccatgtaggtctaatggtaacaatggcactgcagcctccttgacccagcaacactcactctcctccaccccacttcattttcctgcatacacttaacacctgccagactatatatttcctttatttgtttatagtctacctcccagtattatttagggttcagtctaagttggtgtaataaatggatggatgggtggatggatggatggagaatggcttaatcaaggtagaaatggatttccctccagtctagaggaggctctccatagctggaagggtatctctgttcccagtgttcacattaacatccagcctcagtctatcttatccctctgccagcctcaacctgtagtgtttaccttgttctggatgacttcttcagcatttctcttcatggccacactccagtcagggagatacccctttttttttttttttttttttttttttttttttttttttgctcagccctatcttctttcttttcttctttcccttcccttccttcctgtctcctctctttctttccctgtccctcccttccttcctttcttccttcctccctccctcctcctcccctgctttcctcctttcctccttccttccttccttccttccttccatcctcctgtttctttattttggtaaggacctgacccagaggtggtacaccttgatcagaaggtaaacacctccttgatcagaacatagtcacatgaccatatctagctgtggtctccagctggtggtcagttaatgtaaggagttctactattaaaattgggagagaagagcagatcttgatggacaactagaagtctccaccactgtccctcccccggaatgtaaactgccatgagggcagggattttgggatgttttgttcaatgtagtagacccagcagtggtgtaccaagggctgggcagtgggaatatgcaccctggcggggaagagtattttaaacaacattgtttgaattgccggtgcataacggtaataaaagtggactaacataattggtctcattattgtttttatattatccacagagtctgcatccaatattggctgcaccagagcagactgctctgttgcccagcccttggtacaccactgagccctggcacctaaaatagtggctactcatagcaagcactcagtatctgcagaatgaaccaatagatctacctctgcctcttttccttccatttcttcctgacttctacccttggagaggcagccctcaccaggtagtagaccttatggcatttcattatggttagctacttcttcctctttaaactgtgagctctttgagcaccagaacctgcaccagctgccacaacctggccaccaaccaggtgctcaattagtgctagttgaaggaaccagtaaaattcattgaaggctgctccccttagcctcacttagcctgcatttagttgactccaagcaggaattttctatctgattctctttgttttgtctgaacccgagatgttgaggctggaaatacagtcaagatccaatttgtgagctagcttatgagtcaggttaaggaatttacactgtatcctaaaaacagtaggagtcatcaatgcaatttaaccaggtggaactttcattaaaatgtaactatgtgatgtgaggatggggaagaaggaactaattggccctttctcttcagacctcttgacttcagctttctggggactggcatttccactgttcttccatcatttctgagggtatcattggtttaccctctcaatccaaatgttcctctgtggttccccattttgatgtttaatctttgaggcatccacttatgtattcatcgatccttcagcagtcatgtactggaaacccttaggatgcatgctctgtaagacagggcgttctgccttgtccactgctgtggccccaagagtgggaggagtgggctgtcagtaggccaccaataaatatctgtgttctggctgacccccatatgctaggatactggagatgaggaactggagaaggtgcttaaagagcacatctgtctggtagaggacacagagctgtccttcaagcatttgaacgatgttctcatttccctggaatcttctcctctccaggctcacatctctagctccttcaatgattcctcttgcgacatcattttagttctcttccccaacctagtctttttgcttttaatgaatgatcactgatgtatagccctgatgacatctggtgtccacagtggtgcctgatgctccgggtgaagttgaagtttgaccagtaagagggaagaaagaatggctcctccctcatttcagagaatacatcctagtcacaagtgcccctaatgtcactcaggtttttgatagctacattccctcactgatccagtagaatacactaccaactgatgcaccatcttgattaacaacagcaagcctccccttccttcctcagtatctctcctcacatggtctcccatccagatttgctttaagcctgccactctggaagggacaccagagatcatttaaataaaacacattatagaactggttaataggctacctctatgtctctgcaaatattccaagcatagtttggtgagtataatcaaagaccaaaacaatgtttgatcctcatggagggacactatgtcttgttatactattgtaagttcccggggttttattcattttggcatttagtggatttgtctttgacatgttggatttaaggacatcattattcttggaatttagaaaagaacactgtgcctggcatgacatgaagccaacttagaaaacccaaatttgaatcccatttttgccacttaactagctgtgtgatcttgggaaagttggttaatctcataaaacctcagtgttttcatctaataaagaatactaatataaacatagaatggacagaaaaagtgctaaaaatgtacaaacagttcatgtaataactagtacaaaagttttacaaaggtgaacatatgaaaaagatgtttaactttactaaggataaaaaacgaggtatgatcttaaagtgattttacctagcaggtactttaacaggcacttgtaggcattgagtgcagaaaaatagatactcttccccattgatggtagaaatataagtcataacagttttcttaaaagatatttataaattcatgtaaaaaccctgaaaatgtgcataccttttaccccaaaataattccacttattgttttgagcctagaaaaataatcatagcagtatataaggatctatctacaaggatgtttatctcaacatttttataaataatgataagttgaatataatggtaactgtgtaattgtggtcactaaaagtaatattttagaagaatacttcataatgtggaaaatacatattacattaaaaagaaaaaactatgtctagtataattccaatttgcaaaaataatttgtgtgtttatatgtatgtgtacagaatatatgctacatattaaccttaattatctgtggtttgtggatgtagatgattttaattcccttctttgtgcttctattcttcaaaattaccacaacaagtattatttttaaaagggtggaatgagaatgccctggggtatcttataagaatgtgatgaaagtctaaatttaaattataaattaaatcatgcacatttattgtattattgttagatattagactgatctcaagctttgcctttctttttctcccttcttccctttctccttccctctctgtctccatctgcccctttttcttttcttcactgtctattctctcctttccttctaggcccggttttttcctgctccttccatggggagcattgctcagctgcccctaggattcagagtcaaatagtttgctgaccctggtctgaagctcatttgaccaaactgagcaagaagtgcacaagtttcttgcatttccttccagacctctagtagccctgacacacatcctggactaatcaagactatgtgaaacgtacgtccatcagttcagagttgagctcttgtcatataggagcaaattaccaacttctcaaaaactgccaggggtgggaaggggttctttccttctgcatcccaagtgctggatgcctctgccttccaacactactcgaaaatagctttgtcaaacaaagcatgaacactaggagtttctgacattttcataactatgagcatatgatttgcagttcatattgaataacgatgtaagaaatctgccaagaaagctccaaatactatttccagcactggttcataaccagttacagctgcctcaccacagaatgtgagcacaatagactaccatgttccatggtctcttgcttgcaaagtttgtattgagttactaggagtcattctaatgggggaagtcactctcctggaaagcatttaagatgaataaagtgaagggtttaatgttctaatgaaaaaatttgtcaatatattaatcaaatgtgtgaacactaaacgtttttacgtatgtttgctgtagaggttttaaggcgggctttggctttccagactcaaataaagtagatagatgcactgttaaactttcgaacaatgacaaagaaaaacatggggtaattgcttcactcaaagcctgccaggagattaattgcctaagagatgtattttgtgcagtatccaaaaactgcagaatctacaggagtgtcttgctttcactaggagaaaacgtatgtcacctctcaccaaagatgtttatgtcttttcacaaacctgtctttttgcagtctaaaaacattccaactggaaatgactacaaagctgggagttgataggttaggggtgtttagtaaagcttcaaatactctcatggagtcagatacgattccgtactacgagccccacataacagcaacctgggcccagggattgtgaagccttttcatttctggttaatcagtgggagaggtggggagccatgagcctgccttggacccgccagccccgaaactaaaagactaaagttgcagggcttatggggagttcgcctagtgcacttaagaaatagggatggaacttgccttgttccacctttgggattgtattcaaatgagggcttgctaaaggctgaaggtgttggaatctgtaggaggtctgtgtagccatagcagagaaacatagagtgcgcttttataaacatttatttggtgccttctacaaaccaagttatatgtactagactctgctgggagtgagactggggttgcattactactacatggaaaagtaagaacagttgctgtatttctggaacattctgcctggtagaggaacagacttctcaacaaataataattatacagtgaaggatgctagagagaacatattttctcatgaactaatctgaaagtttcaggaaagcatcttaaaggagataagactgaaccgaaactggaaggatgagggacagagagccaggtgaagaaaaatgagaatggatttcctggaagggaaatagccaaggcacaaacatcagtgccagtgtgatatgttcagaaactataagctgttctttaataccaggacctgagaaccaagaggggcaatgcaggagactgggctgaagatgtccatggggcagttatatagggaccttgtgattgctgttaatgtgctaggactgttgccagtggactttatacaatagagagtcactgaacatttgtgagaaagagataatgcaatctacctattagctcatcattctatggcaacaggaaagatcaatttacaggccaagaatggaggtagagagaccagttaggagactcctgcagccatcttggtgggatattttgagagcttacactagagtaaccataaaaggttagaattggaaagaacatattatacagttcaacttccatattatacaaatggagtaagtgaggacaaagaaggtaagtgacctatccaaggttgtatggaaataaccttgttggcagccaaagtgggaccaagaccctggtcttctcatttccagtccggtgacttttccactcagcaatgccaagttcagtcccagcatcatgcttcagttagggaatgccctagagaaacttgaaatgtacttggctggcatttttcctggccatatctaggaagtgagaacagtccttgttggatggagggaccttgaatccagccaggctgcctgggagggatctttttctgttcattatctttctggctttaggtacctcccacatcttccaccctcttcttctcctctaaaaatccttcttcagccattgcttacaaattctctcccttctgctgagtctaggcagtgtagaacaaaacctagcaccttttttcaagtttgtttcctcaatattttaacctaactattgtatcactgttaagcacttgggcaattttgaggatgaataatccaataaaatcgaactgtttccatctaaactccttccacactttacatggcggtgttatttgtgcaaatactgttttgtgttgtctctttttcactaaatcatatatgtacacatttcaaagctcttggctttattatatatttcttataatggacactgcaagaaatttggagcaagacctaagcttttgggaaagagacttaatctctggacctaattcttcaactataaaatggagataatgctacctaccttgaggggttcctggtacaaggtaggcgtatagtaagctttcatctctctctctttctctgtctctctctgtctctctcctctttctctttcctctgtgtgtgtctgtctctttctctgtctcctctctctgtctctctctctctctgtctctctctctctctgtctctctctcctctttctctctttgtctttccgctgtgtgtgtctgtctctttctctgtctcctctctcttggttgcttctggtttggggcaatgtagtattttcataaacatgtatgatcacaaattatatccatgctgaaattcaaaggtaatttttttgatgtctacctcgaggcctagaatactgttgagcatagaataaaatctcaatagggcataatggtaggaagaagaaatgaagaggagaaaaagaataaaccatcttaacttgaaaaccaaattagctgagatgctcgtgagcttccaatctcatacaggcattctaataacaagtattcacttactgtggacccaagaacggccagatggcttgtgaagaacatcagcctcagcaatcacacagatttccaccttagatggccttttgcagcctttggaggatggattggaagagtggaaggttggaggcagggctctcagtgaggggcagctgacaggtggtgggacctgagccatgagggaagaaagtggtcaaattcaagaattcctttggaagcaaatttagttttcaaggttgctactcttagaagctgcccctcttcctcttctcattatttcttccatttagcaaaactaaatgcatggggaggccaggtatggtggctcatgcctgtaatctcagcacttagggagatcaaggtgggaggattgcttgagtccaggagttcaagaccagcctgggcaacatagcaagaccctgtctctacaaaaaaaaaaaaaaaaaaagtaaaaaaactagccaagcatggtggcacaagcctgtagttacagctactcaggaggctaaggcaggagaatcacttaagcctggaagtttgaggctgcagtgagctgtggtctcaccaccgcactccagcctaggtgacagagtgagatcctgtctcaaaaaataaagaaaaatgcatggagaggttgggtggctggggtggggaagtagagagattgactacacatttcagattgctagaggatgccaccacacagaaattaaaataaaaagtgggagagatttaattcacttattgaacgtttatttattaagtatcaacaacttgacactgaataggcactattctggccattagggacatagtagtgaccaaagcaaagttcctagtcccatgaagtttgtttataaacaataaacaattgaatatatcaatacagagtatgcctgatgagactaaatattaacacaagaggtaataatcaagtaagtgtcggggggaagtggcagggcatgaggtcagagaggcaaggtgaggcaggagaagatgatgtaaggatattgtaaagatgccagttttacttagcatgacaagggaagcctttaggaagattgaaacagaggaggaacaggacaaatctgtgcattacaaattaatcattattttaatgtgaattgctgcttctgccattataaaaatttgtaagattctacctgtgacatgggcatctctgtattgcctttgggtgggtgctggagttgagggtacagagaggcattaaactcaccattgctttttacggaggccagtagtctttttttaaccaccatcagcagaaggaatgggaaacaaagctgagatgagacagaaaagcaagaattggggattgggtttcaccccacttctgagtagtaagatgaaattaaaacccttctaagatgtccctgaattccatttaccactctttccacaaaccttctctttttcaatccatgcccaaaggcataaaaggaaagaaaaaaaaaatcaaagcaattccagtaacacttgtggtagaaaatctgcctagattggtatgtgtgaatttcatattattctaaagtcccattattcttaataggcaattttagggggtggtttgaatgcctgatatttggagaactttcaaagcacatccaaggggtctctaataagaacttgggggcgctgaactcggggactccaagtgtcacctatgcatttccagcttcagcctaaccttgggggcaaagcaggcccttaacagaggaaaagtaaaaacaaccaaagcattcttagaggtgcaaggccgccctatcatgaaaacctcagtaaattgaagacagtaaaaaatcactcattcttttgattagcagtcttctgtattcttgcaaatactgtactagtgcagtcctatcatttcaaatgtgtgtttaaataggaataaaatatattacacacataattttccctcaaattacgtttgtgagatacaagcctgggtaattctgctcctgttccaagtgaaatgcaaacccttgtgtttccaaacatcactatgaagcaaagccaataccttcccttttctgagttggacacaagtaactcttccgtgctgctctggaaactatgacagaacgttattcatctgtttgttttaatagccaagggaaaaaaacttcaaaattttgatttaattttttaaagaaaaaaaggtggtatgaaacaggtcgagggactctttagctaagcgaataaatgttaaccaaattgtcactgaccagatgtgggaaccagcatgtgatattcgacacagtcacctcaaaattgcttatgcttacaaaggcattccaataaaagaaaaagggatgtaagggttagctgaattctcaaccctatagatttaaggcttctctgtgagtcgttggccctctgggttgacatgccttgattggctccctttcaaaactgaccttaaaggtcaagtatgttaacatgtactttttgatgctcactttcagaccggtctttagaaagcagagtttgtgagataacttcaggatcacatatttaacctgtaatctcttgaccacagccagcctgaggtgaagtctgcttttggtgctcccgacagctccccttcctggatcctcaccctccccagccatccctttccttgtctctgcctatacctgtccagagatgctccctctcccagggccatcatttcaaggtgtgtgcagctagggctgataagatttaagtgatgccccctcctcctggttagcagttaactaaggttgcttccaggcttgaagtctcctccagaagaggaaggaggtaggttggaataggaggtaacttttcagaccacctccaattataatctgttcttaaagtttctatgtctctgatcttctgtctacattggaataattctgcatcttttacttggatccttaattttataatgtagccccatttttattaaaagccagggctaattttaccttgagagatctgtttgcccctcccaagggagaagaacgctgcctctgaagtgggaagcttcacactcagctcgaggttactagagccattatgtggccatgcttttaaccagatctgctaataggtggcccgattcacaagttttaaaaagggatgttttccatttattcatggccatgatggtcttttgggaaagcattagtaagttgtgtttgcttgggtaaagagaaattgctatccatatgacagaaaataactcccactttaataaactgctcactgagcaaacctatggaccgtccatctctttgagctgtgtgatgactttccttcaagggttttaggggcagccatcttgatgtgatttcctctccatggctcaaaacagggtgtatgaaaggggctggggggataaattcagaggtcagaggtgttgggctatttatttcactgctctctgtccctatgaggctgccatgctgtgggattgccaagtcactgtccccggcattccatttgaagagccatgagaatcagaacaaaagaacctgctgatactgagtaaactgctcatgcttatatcagtttagtctgcttggaagtgacttacaaagctacccccacgacctcccccaccttgaggcctgaatttgcaaccattggccctctcccaaggtccctctaccttggcccttgtgtaaatgatattttttttttaattaaggtggaattcacataacatagagttcaccattttattttattatttattttgttatcgttatgttttaaagagatggtcttgctctgtcacccaggctggagtgcagtgatgtgatcatggctaactacagcctcaaactcctggactcaagcaatcctcctgcctcagccccctgaatagataggactacatgtgtgtgccaccatgccctgctaattttttcatttttaattttgtagacacagagtctcactatgttgtccgggctggtcttgaactccaggcctcaagcaatcctcccaaccttgatctcctaaagtgcggggattataggcatgagccactgcacccagccagaattaaccatattaaaatgaataagtcaatagtagttagtatattcataatgttgtataaccgccacatctgtctacttccaaaacattttcatcatcccaaaataaaattccttgcccgctaagcagttacttcttattcctccctgtccccagcccctagcaaccaccgatctgcttttctctaaagacttacctattttaaatatttcatataaatgggatcatacaatatgtgccctttttgttcagcttatttcacttagcatgtttttgaggctctcccacatcgtaacctgtttcagtacctcattcatttttcatggctgaataatatagtctattgtatgtatctaccaccttttgtctatccattcatctgttgatgaacacctgagttgttcccacctttggactattgtgaatagtgctgctctgcacatttgtgtacaagtgtgtgtttgagtacctgttttcaattctttggtttaagtgagattttacagtcaggaaagtccctctgcatccattctcttctcattaagaagaggtaggagacccggcgtggtggctcacacctgtaatcctagcactttgggaagccaaggcaggtggatcatctgaggtcaggagttcaagaccagcctggccaacatggtgaaaccctgtctctactaaaaatacaaaaattagccaggcatggtagcacacgcctctaatcccagctactcaggaggctgaggaaggagaatcgcttgaacccaggaggtggaggtttcagtgagctgagatcgcgccactgcactccagcctgcgcaatgggagcgagactccatctcaaaaaaaaaaaaaaaaaaaaaaaagagagagagataggcattttaactgaaattatccccaaaaagaatattttaggaccaaatttgtcagtaccgatcggttcagctatgtctgcccatgccctgtatattctgatgaggaagaaaatcgcttccaattagaggatactcctggtatggagaagggtccactttggtgggctaccctgggatagtctcctcatctcttctagttctattggcctgtcagtggtaaggtgggcgctaaacagataaaatagtatatgaaactggaaatctgtggaatggtttgatgaaagtactgggaatgggtggggttagtgagtgactaactttccagggaaggtaggggcatttgggtctgaaagatgagaacattcacaaggagaacgagggggtggagggcatgccagccctaaggatgagcatgggtcaagccatgtccgcatcgaagtgcatcctgtggtttgagactagcaagatcatccacatgactaataccatcaggcttgtaggcttgtctggcagggaaggaagctggaaaaactggcaagaactagattatgaagtctctgcagaacagcatttcctttccttgctctgcagtggttcctagatgggcactccttttgctgccgcactgttccacgatccctcttagcactcttcaaatatccttcataagctccttgccctggagaaggaggagaccctggaggtggattacagaccacatttgcgtttcccaatcccatggcagagaatatggcaggttgtagaggctggcaacatggtaactcaattacctttatgagaaacatgagctcccatcacaaagcacccctgcaccttgacatcatggtgaggcagcggcgcacgctggtgccagccactgtgatgaatggccaaattccatttgccctttcacaatgcacttttcttctccattgaatgcagccttgggcacgctcactgcaagtgcccttgcacttttgctaccttgccacttgcttcatgtttttaatttgctgagcatggagtaaggcaggaagacatcaatgatgaaagaagtgtgagctggaaaaaagcataaagctgattaatgctggaggagcatttgttcccctccagccaaagccagtggggaaaaatggaaaagaaagaaatgtgtttttgactttatgtttaaaagaaaaccttttaccacccagaatgcaccaaagcttctccacagcagaaagcccctctaagcagtgcaaaaactccattgccaagccacttggaaagaagttatagagtgtggttagaaacactatttagagcaaatctagctcttctacttgctgcgtaactttggataagttctctatgctttctgagtctcacttttctcatctgtagaacaggaataattacatctttacctttttttataagattgttgttgggataaaatgacttagtatctgttttgtaagtatataaaacttagcagtatctgatacagaatcaagactcgttataaggtctctttctcgagtaggctgatttaactaagagtagtattgaaacgcagaacatagttacagatctaacaacatgggatagtggcctcatcttgagtttcagtttaaatcctagctccaccacagactgactttgtgaatttgagcaagttacttaacttctctgaatttgagtttctctctcgtaaaataaggataatagctcatcaggggctgctttgaagaaagcacctaacacagtacccagcccagagcagcagacacttaatacatgtttggtttttttcagtgttgtggttctcaaccacattcaaatcacctgataggtttctttaagcatagatacctaagcctcatccccagagactatgatttaataggtctaaggtggggcctgggcattcgtatttcctaaagcttctcaaggagattctttcattcttttttttttttttttttgagatggagtctcactctgtcacccaggctggagtgaagtggcatgatcttggctcactgcaacctccacctcctgggttcaagtgattctcctacctcagccccctgactagctgggattacaggcacctgccaccacacccaactaatttttgtatttttagtagagatggggtttcaccatgttgactaggctggtcttgaactcctgacctcagatgatccacccgtctcggcctcccagtgtgctgccaaggcgattctcataaggagccaagacagaaccactccccagcagataacagtacatactggttttggggtttttttgtgttcttttttaaaaaatctgtctcccaggagactgaacaggatagtaggaattctgggaatagtcaaaaatttaatacacctgcagttctaagcctttgataagaaatgtgcagccaaggaattgcattccattttattctgaaaaaaagtattcaaagagtctttttaagagtcttgaactggaaaggtggtaagaagtttagcctaagcctcacacataaaatatgggaactcccagtaggttggggatttatatctgggggtaattccagggttttgtcctcccaagagatataaattgaagccttgagagtttaatgtgggggagaaagaagtgttctcataatgacaccttaaaaatccagggctctgctaatgcctagggatagaaaagcatcatctgtaatagcaggggggtggcatgggggtgtattctggtctctgtacttaggtttccaagatccaagtgtgggtcatcaagaaccttctttctccccataggtttatggtattagttacccaataaaagttgggttaattttacaacccaagtaaaatttaagccaaaaaggcttcagcattactctaggatttatgaaagtaaacatgtggagtgcttgcaggattgtgcaacagtaaaatttcaatgtctttatgtcaggtatatgatatattcatttgtatgtgtatttaaaggttaagtttttaagagctttgcaacacaaactattttcagtactaaactgaagatacttcccccactttcacctttaaaatgattcttttaatgaatgggagtagagagaagcagaaaattagtgtcctatcaggtgatttttccacttggtttgctcctatactttgactttctagactcctacgctagaccttcaagctgggaagtgagcaccacagcactaaccgcagtgcctcttacgatgtgggagcttagtaaataactgtcttttaaataaatgtccctttggtcattgtaaatactttaagaatagccatatattatctctacaatttaaaaaagcttttacattatctgatgggatcataatgactttcccatgtagggcagagaagtcagttactgtgtccaacttgtagatgagaaaattgtggctcagagggctcagacagcttgcctaaggatgcccaaatgttaaactcaggaagagaattttgttctcctgactttgctctgagggatttttacttagaagaaaccaaaggggaaaaacggtgtatttttttttttttttttgagatgatatattgaggaggagcatccagggttgaagtcaacttatacacgtggcaggcagactttggtttggctatggtctgcctttgagaaacagctggatgttctgcactcgagggatcttgtgctcatcgtaggccctcgtgggagatggtagcctctgccctttcaggttgagcctgccatcttgggtcttcatctccagccttagatctccagtccttttacctggcacatgaatcatgtcatttctggtgtccctctgtcttcaagatgaaatctattacccctccttataaaaaaagtcttataattttgaggccgcaaaattttaataagactatttttttaaattgtagagaagcatgaaagcaaactttccatggacattttctctagatttccttggatttagtgactcaattcaaactctccagactatggtttgccctggtcctctttgggcagggtagagataatggaggttcagcagtgaagagtcacctaactgggctaccctcgggtttctttccagctgcacccagcttctcaccccatggatccccctaattgacgtgtcagttggagtggatctgttcgcccacgcctttgtagcaaatgaagcagaaataatctgtgcttaaaaaacaaaaaactgtagaacatgtgcccagatttccaactcatttcctctttactcctataactacatcatcttccagcccaccaccagctgcgaaaataaaagcattttctcccatatttaaggatgattttgtgcttcaggatgactttctgggggtgtaggaaacttgaccaatgtgaccaacagatgttttaagaactgagcaaaagcccaattccttagcccagtcttttgtatattgtgcccaactgtgccccctagtgactatttagggtatcgcgcagtcagagcttgctgtgccctgtatgtatgtggtgcatcagctaatgtctgtctatgctttctttcagagatgagtatgaagaagatggattctgtcagccatacagagggattgcatgtgcaagatttattggcaaccgcaccgtctatatggagtctttgcacatgcaaggggaaatagaaaatcagatcacaggtaggtagcaccaatgaaattatatttgtcccttgaataactatttttctcgccaaaagttttattgagctcctctcttgacaaaggattaagctcagcatggaggttgggagcaggaccataaaaaagcatgagacatgatctctgtgctctggaatttacattaaagtaatttattgaaggttgctcttagaggaaaaggaagctttgtgaaatctcacattcattcaaacactcaataaatattattaagtgctttcaccgtaccaggaactgaatctgaatgggagaggtgatggtgtgtaaataagccaggtacgtctctgccctcacagagcttactgtttagaagcaacatgatgtcgactgagaggggatgaatttagagtttagagttctggacactcatcccagaactattatgacagtgaactttggggaaatcgcttactttcccaaaaagtccccttcttcatctgtgaaatgagtgatgaagcaagatgaccattggtctcttcttgctctagctttcaatatttcactcttcatttttcttaattgaaagtatccttttgatagaaatctaatagcgaagcacttactagcacacatgagttaaagtagcataggctgcctcataggattttgcacgcatcgttctggtggttacagcagctttgtccccttccattagtgtagttatgatgcctctgtgtcacgtatcctttgcaatccattcacattgtcttcatgacattctaatgaggttgccatatctagcaaataaaaattcaggatacccagtaacatttgaatttcagataaacaacgaataattttttagtataagtatgtcataaatatttatctgaaattaaaatgtaaccgttgtctttttctttatctggcaaccctagggtctaggagaggtaagaacaaacccaaggcagaaacatagaacagcaaaaggcccagaagctatgtggaagctatgtgctatgaggaatgtgaaggaactgagaggaggctggggggaagagggaggaggactttttttttttttttttgagatggagtctcgctctgtcacccaggctggaatgcagtggcgcgatctcggctcactgcaagctctgcttcctaggttcatgccattctcctgcatcagcctcctggaggactttttaaccaaccaaaagaagcaactgtaggaataggtagttgccattttctgaagccctcatttcaacaggaagagaattctgaaatttcaaagagcagtaagactgacagggaggagctgttaaacacccatttcaacctaatgtaagaatgccttaatgtacttttaactgaatatccacaaaagcaagtagacattttgggccaggcacagtggctcactcctgtaatcccagcactttgggaagctgaggtgggcagatcacttgaggccaggagttcgagaccagcccggcctacatagcaaaaccacatctctactaaaaaacaatacaaatatcagctgggtgtggtggcacatgcctgtagtcccagctatgtgggaggctgaggcatgagaatcccttgaaactggaaggcagaagttgcactgagctgagagcgtaaccctgcactccagcctgggcgacagagtgagactgtctcaaaaaaaaaaaaaaaaaaaaaaaaaaagtggaagttttgatgtaaataattggtaacctatttataaaaatcctctcttggagatttctaatgggtatcagcctggtggaaagtttttttttaaattcatttacctttgtttatcccagcgtttcccaaacttgttggcttgtttctcaagcactattctatttcacatgattaatgttctgagcaacatacttggggaaataatgtatcagcaacctcctaggtttccttgtgaggtgtaagctccttgtcaatagcggtattcaaaggtaggctggtgcgctttttgtgcatcttaccctactagtaagagattaagctaaggaaccactaatattcgatgatacacattggaacaattgtactgtgctctttgagaacttccaagtgagttgcctcattttcagaagatggagtagaaagtattccagccacaaagaaattaagcaagttaccctaagtcatccagcaactcttgccgtccagcaagacacagaactggatcctgtgctcaggctcagccactgcggaaacaagttctgtccctacagctgtcaaatgttttagaagcctcacaaaactaataaaaagcaccagatgaaacacaaagttcgattgctttgtagtaaaaaatgaaaaatatattgtactttaacttaattaatttttttattaggaaatggtacatatgtaatttaatcctgttttattaactttgtagtcaaaatggtttttttcaagccagtgaaagtaagctgcttagacatctgaaatgaatctccttctctgggccttgtctgtttcagcacggcggattccttgcaatgtgtgtttatatctgatatccgttgactagataaccaaagaagataaaccctggcctctgggagttaataattgtgtttgttttccagctgccttcactatgattggcacttccagtcacttatctgataagtgttctcagttcgccattccttccctgtgccactatgccttcccgtactgcgatgaaacttcatccgtcccaaagccccgtgacttgtgtcgcgatgaatgtgaaatcctggagaatgtcctgtgtcaaacagagtacatttttgcaagatcaaatcccatgattctgatgaggctgaaactgccaaactgtgaagatctcccccagccagagagcccagaagctgcgaactgtatccggattggaattcccatggcagatcctataaataaaagtaagtggtagcccctgaccttctgtgctcttctaagggtcagcaacctgttggcacagggaaaactggaccttgacccatagtgattttcatactgttaatcaaattattttccaatgggctgagtactgtgcctgagcattcagtggtggattagacatagttatcttcaagaagcttcatgaagacaataattttaaaatattggagctggtttctcaataacttaaacatagaattactatatgacctagcaattctactcctgagtatgtaatcaaaagaactgaaaacagatgttcaaacaaaaactcatatgagaatgtttataacaacactatttacaatagccaaaaggtggaaatgacccaaatgccatcagtagaggagcggttaaacaaattgtggtatatccagacagtgaaacattatttatccataaaaaggaatgaaatacagatacgtgctacaaacctggatgaacctggaaaacattatactaagtaaaagaagccagacaccattgtatgatccatttatatgaaatttccagaatagataaatccatatagacagaattcagattagcggttaccaggggccaggctaggggtagtggagagtgattgtttaatagatatggggtttcctcttagggtaatataagtgttctagaacctatagtggtgaaggttgtacaatattgtgaaagaactaaataaatgcactaatggtacatgtaatggtaagtgtattatagcatgtatcagtacattctcacattgctataaagaaatacctgagacagggtaattgataaaaaaaggaagttcaattggctcacgtgtggttctgcaggctgtacagggagtatagcagcttctgcagaaggtgaacggagagcaagcttcttacatggcaggagcaagagagtgagtggggaagtgccacatgcttttaaacggccatgagaatgagaacttactatcccaaggacagtaccacggggggtttgtgctaaaccattcacaagaaccctgcttccgtgatccagtcacctcccaccaggccccacctccaaccctggggattgcaattcaacatgagatttggtggggacacagacccaaaccatatcataccgccattttaaagatatagatgggtttgcctccatcccctaccccatcagcagcaccacgcaaaagactatttcagtgtacatttccctttcatctagaattaatctcaccggcaatttttcagtttccttttgatcgttaatactattttgtgagttaagtaaatgagtgcatctaaaatgcttaacacatggtaagggctcagtagcaacattattattattgtcattactcctccaaactccagttcagttcgactgtgtagattctgcagtgcttttaagcccctctggccacgtgcgaggtcttcttaatgggatctgcttctcaagggtgccgaccccatcagcacagagatagcccccacttttgttagaaacccagaatgcacagcctctgataagcatgttctgtgaattacaataccaactagattccttattacatgatttcatgtctaaggctgtcagtcagaatggaaggaaaagtttggcttgaaccttccttgaaccattcactaggaaattacttctgtgcccccaggtcccaccccagttccgatttcttctgtgttcaatgttagaaatacttttggaagactgattttattcctgaagcaaaagctttaaatcctcccaggaatgtaactgcaaggcaggccctgggtccaagcccagcaaagcagggagactgtcctgcatggcccctgaccagcagggaagctgtggccacgaggttaattacctgccctcccctccagaaactgctggctagaggagagctccagcatctcctatgtttctttctaattgtttgggtttttgtgtgtttttcagatcacaagtgttataacagcacaggtgtggactaccgggggaccgtcagtgtgaccaaatcagggcgccagtgccagccatggaattcccagtatccccacacacacactttcaccgcccttcgtttcccagagctgaatggaggccattcctactgccgcaacccagggaatcaaaaggaagctccctggtgcttcaccttggatgaaaactttaagtctgatctgtgtgacatcccagcgtgcggtaaatagaagtcattgcccctaatgtattcaatcatctttaaagatccctatcctacccctcttatttaggagaatcctataaggggggcaaagaaaatggacagtatttgcttgatctcaatctggttttagggtaaaccttgccgtttctacataaaacacctcgtaaggtaccaaaacacgttctcaagaagtcaactgcctttatacctgcagccattgcactcatggatgtaacagggacccagcccttcagaggcacagttgagacagtttatcacattgatttttatagaaaaagatgttacccagaatggtctgcgtccaagtggaccttttcagcaaaaaaaggaatattggaagcaggaagaaattgttttctgtatgccttaagaacaccacaaggcaggatgaatctacaaccattactcggtcatccaggacaatctgtgggtaaactgtgtccttcgttatgtctgttaatactgcagaagaagcatataggtatctagtaagaaaatggaattcctgagtcagttaactgttcctttttctagaaaatgtttggagaaaataatgaaaatgggccaagcatggtggcttatacctgtaatcccaacactctaggaaggccgaggcaggaggatcatttgagcccaggggttcaagaccagcccaggcaacatagtgagactccatctctaccaaaaaaaagaaaaaaaaaaaaagaaaatgttggtgaaacctggagttaggaactattttggaactaattcatcttcctgatcctagttctcatagatatcatagataatgccaagtttcccaggcatagtgggagagtcaggatgtcactgctggaaaagcaaaagctacagggtaggagggtgggcaaacaagagcaatagtcatgggacccacaatacaaagtgagctcggtgtttaaccagatgattattcaagccattcattcagaatatttgttgagtacctactaagtgccaagtacttactcatccgagcatggggagacgccagggaccctaaggagggagtaggcatagcacatccacaaagaagcaaggagtcatggaggcggaacaagcaaaagggagagtagcagaagattaggtcgggaaagtaacaggacccaatcatgtaaagctgtgtaggccattggaggacttaagctttgacgctgaatgagttgggaaagcatgagagggttttgagcagaagggtgacatgacctgacttatatgtttgaaggctcacctgggctgctgggttgagactagcctgtgggaaggatgcaagagcaaaagcaaggagatcagttgggaagctactgcaggaatgcaggggagagataaagtggccttgacaggaggaggagtggaagacggagggacacgtgggcagattctggatatgtgttgaaattggagacaagaggagtcactgatggatcagatgtgggatataaatgatggaaggaatcaagagtgactccggagcttctccatggaattgccttttgctgagacggagaaaactataggaggaataaatttagtgggagctggaatcaagagtttttgttcatgctgagtttgagatgccttttagaaatccaaaaagagatactgaggaggcagttttatatcacagactgaagttcaagtcagggtctgggatgagatggatacgaaggaaatgttggcatacagatggcatgtaaggccatgacacctgaaggaaagaggagcatatctacttaacaaaagagaaggaaatgtcagtgcaagacaatgaaagctagctttagactctgggtcaggggcagtagcctcagttcctaatgtaataatgatctaactgagtggctaccatgtgccagatcctatgtgagacaccttacctctgtcacctcattcaatcttcatatccagcttctatcatcctcatgttatggataagaaaactgacactcagtaagaattaagaggtttgctcaaagacactcagctatcagtgactgaatcatgattttaactcaggtcagccggattcccaaacctgttggctctttccactaagcatactctctctctagagagcaaaatgaatctgcttaatggcaacaataacaggtaaacaataaatatatagtttgtagtaaaagcagtttattgtaataggtaaggacatgggttctcatgtttaagtgcctgggtttgaatcccaggtcttcaatgaaatagctgtgtgctcttagccccttctaatctcatttttcttatcagtaaaatgagaaaataatgatatacacttaggatttattgtgagaataaattagttgttaactgaaaaaccctatgatgtccgaacatagtaaatgttcagtacacattatctattattatatagtcaatatataaagataaatcgattcgaattatcacatagtcaacatatgtaaataaatgcttgctctcagctcagcaaatattgtttgagagcccaccatggagtagggaggttataagaggaataaaatgattcatgcttttgaggtatgtcagttacaatgcagtatgtatgatacaatagaagttagcacaaatgttatggaacaaagaaggggaagggcttaaaaaattactaaagaaatccataagaaaaagttttaaaaatattgaaaagaaccctagtgatgaaaatttgagagacccttattctataattttgttcctacctgttacttgttattatagtgactttacttgcaaaatggttttacggaaagttgaacacaacaaattttagaaagatcaccacaccccctttgtgttgccgggtttcatacaccttcatatgggctttaatatactttcatacgtattacaaagtaacctcttgcagagccattgttgatcatttcaaggaaaattattctgtattttgtaatggtttgcacttcatttatgacattttccgtgttattttcaacagtgataagaaaggaataaaaacaaaacatagatttacttagttgccccattccttctcctaaaccaggtaaggtatgagagtctgcaagagagtccaggataaaagcagtacttactaagcaccttccacgcaccaggcacagtgctagggttttcacatgctttctttatcctcatcctcatactctgacaggtattattaaccctatttttgctgatacagaagctgaggctgagaaagccccagggtcatccagctagtaaatggaaggtctgtctgattccaagctcatcttcttgctactcttctgtgctacttcgggttattggttgatgtacagaggaaaccaaatgaactggtttgttttgtttctttgttttttgagacaggatcttgctacgttgcccaggctggtctctaactcctgggcccaataaatctttctgccttggcctcctgagtacctgggactacaggcatgcaccaccatgcccagctttaaatgaattgttttaagaaagaaatgggctgggcttggtggctcacgcctgtaatctcagcactttgggaggccgtggcaggcagatcacttgaggtcaggagttcaagaccagcctggccaacatggtgaaaccccgtctctaccaaaaatacaaaaattagccaggtgtggtggcatgcacctgtaatcccagctagttgggaggctgaggcatgagaatcgcttgaacttgggaggcggaggttgcagtgagccgagatcgcaccactgcactccagcctgggcgatagagcgagactcagtctcaagaagaaaaaagaaagaaagaaaagaaaagcattatttgttccaccctaggtaaacactattgttctttgggtgacttctgacccttaatttccaaccaatgcctatcagaagtagggaagtaatttgtccagaagctggaagacatattgatactctgattcaaggactcaagctctattacgattagtttaagcaaggattacaaattatacctaaagtactcgttttcatttcgatgcccttcctgcagcatccagatcaaacccatgctaggagggatgaaagaaaccttcgaaaggtctttcagactgagtagaaagagggagatcacttacatctacaggatacctactatgtgcctgcatggtgcctggtgctttacatattcatctccatttaaaattcacaaccatgctgtggggtaggtatgattaacatatttcactgaggttcaaaggggctacaggacttgtctaaatcacacagccaaccactgtctgcatagagctctgaccaaactcaaagctcatgttcttttaccagacactctgctatctctcatttgaagatttttctgaaataaatacaagcatgatgattggttccacctctggattacatcatgccgatttccattatatgatatgacatcaaaatcttcccgtgctgatgaagaactctatcatagtattactcagtgtgttattatcttagtattaatcagtatagcaatgttgaaaacccttggaatatttcttttctgaatatatgtgcagaggacacagtgaaaatcctgaggactggttaatactagtcacatgagagatgaatttagatgaaagttaaatatagagatgacaaggcagttttcaccacttagatttttttttaaagaacattttcattttattttaaaacaaagcagttcctcttgaattcttcaagccaagccacgaatatatccattaaaggaacagggaagccttgacatatgatcaataagctgctggagggccagtagctcccaggtgggattcctgagaagacagtaggtcagcatcagctgtgctcaggggtatgcgtgtcttctcccagtcgccctcagcccacctctaacaaactgatcatcatggaatcctatttttataactcctttggggcatttgatttttttttctcatttcattgtcacaaaaccatgaaagatcaagtaggaatttccagccctgttttaccatatgagaaaatcaaggcccagagaagtgagaaggcttacctaagatcacaaatgaattcatggaaaccaggtctcctatctctaggaccactgctctttgttctacaccagtgattctcaaccaggggcaatttcatcttccagggaacatttggcaatttctggagagattttggttatcacaagtgggtggggttgggggatgctactggcaactgttgtgtagaggtcagggatgttgctaaatacactgcagtacccagaacagcccacacaatgaatcatctagcccaaaatgtcgaatgttggggttgaggaactcttttctacactgtacaattgtaaactatagaataacaataatattcaatagtaattatcatttattgtatgcttacaatgagctgaaaactctgctgacacttttaggcattatctcatgtttaaatagttctatccccctaggagtaggttttattatacccaagaaagaaaactgagacttggagaggttaagtaacatgtgtccgaggtcacatggttaataagaagtggacccaggactcacatctgtactcagccttttaaactgtggtttatgcatgtatgttgtgtatgtgtttttgtgtgtgtaaacagataaaacttgagaataacttcattttacagtgagttgtaagctagtggggcagatttgaaatgagccctttttctcctccatcctgaatgagacagagtctcataggaaaattcctgcattctttagctaactcaaagttaaggagatttcagaatctccatggggtttctcattttcctactgataacttttgttttagtttcaactaagtagagctaaaagaagcataggcctaattaaatagaaaatgtgaacgtttgttgtactttctctaataaaggcgcttgagaacagtctgctgcagattgttttatctgtgaaccttcactccagagcagaatataaaattaagtacaatcaaatatggctgttgtaaattctgggaattggcttggctaggattatatgcatatgcccagacagtgcttagagaaagtgaaaaaaaagacaaaagttggtttgggcaagacctggcttctcatcctccatgtcttttctttcatgtcacaggcatctaacaattagaattactaattatttattcattcactcacagaaaccaatatatgttgagcttctactgtgtctcagaccctgtgaacaagctaaatcagaccatgcccttgtgtagcctacaatctaatgaaggaatcagatggaaaaaaaaatatgaatcacattaagtattgtcatatagttcccagttttatgtctgctcttatgtgcgtggcattttaatgatgactactgcttgttgaatactgtgctaagatatctgtgccggcatctagcctaggacttagttggtgctcaataaaatgtgttgaattaattggtttaatccacacggtaaacacaagataaaggtgtcatctccattttcctaaaggaaaaacaggcaatgttgtttttactgaagccgagattcaaaccaattccatagaatttcatatccattcctccatctaccatgccataactgcttaaacaatagagtcctgattatttcagaggaacacacattcctttattattttccctttccctttgatcattatgatctctctgggtctttgggatgctgcccattgatattcttatttgcagctccagggatataggaatgaagcccccagccacaaagatatctactctgagagaccctactgtgctcctcttagatgcagccctgatatagattagctccccagcagctccacccacatctcacagggtgtgcccttctcccattaagtcccatctcctctctttctggaagccccatgtctcctccagtcctcaaagttggccatcttctctgcctgcaaagcttcattcactatgctttcaccttttgttgtggtcaccttccaagtcaaatatcttgggttgggtgtaaactaaattgagaaagaagcattttgcctaagttctttctaactggcatctaggcacactgcctaggttcaccatttcactgtagccctttatcattgcttttctatgcagctctgggggtgtagctgtggaaactgtcaatacctctgagaactccttttgcaacaatctgtccattttactttggttgtattttattaataccacaagacttatgttctctctctctctttctctctgtctctcatttagatcccctatttgtttctttcttgatttgtatgggaaggcagaatctcaatcgtattggtatttttatatttaaaccatgggcctttgttttacccttgatcaaatcctgaggtcacatttcttctcctagccatgccagcatgtctgtttctcctctaagtaaaggtttctccctctaccaaataaaagttccaagcagcagtattgtttttactcctaaaccagcttcaccaaagagtatccatgataagaaaagtggtgaaccatttggctccatttggagttttcatacctggcctattgcttttgtatttccttttaagtcactggcttgcaacaatttgccaaagggcgcattgcccagttttgtgcctgaatagccttgacttgtcctataatcttacaaacacccaccctgggctccagtttgtcacaaaccatattctgcaacgtggtggtttacagttcggggcaaggcagatgttttccagattgtgaacactgccatttttaacttgctctgtcagcagccttctcccatatttcatagaagacctgttgtaaggcaatttgtctttcagccatttcttcaaaataaaattgaacgttacagtgaattggatggtggagggggtaaaggaggaagaagtatagcactgttttatatagtttgaagctttctggaagagttatttttatactgcagagattttcaagatgtgctttcatttccagtctctatacattttcaacaacaaagtaaagaacaatagtgacccaaaacttatagctaagtcatgttccatgaacatttttaaccataaaataatttctctcaaaggtttttttgttgttgttcctagtatatattgagtcatttacccagtgtgtaagctgctctagcaataagcttctgaaacctctgaactttttgggctcaccaccatgccagtaagaagtgcttgttggtgtcttaacctttgctgacagaaatctgatataataccacaatgattgttgccactggctttgtaacaaactgttttttggttaagcttctggcaggaaacacatggcacaagccgatagactaagggaaatgttataatgtaattatttagggaggcattggcagaattaggagaaaccattaaggaaaggtgcgagacctggggctaacatgaatgggaggtattaccatcctagatcagttaccttaccttgcagaatatagctgagactgaagagagggctgtccagcacatgctgtggcctttggtagagggatatagtcaaccctcagcaacccagcaaggaggaagccagaggaacaagggtttcaacccatactcttctcctgcctttcatctctggcaaatgactcccataggttcaacctaactggaagccacaggtcaaaggtatccattgacactatcagtagaggttggcctcagcaaggagctggtcagaaaggactgagactggatctggtgggctgaggatactcaggggaaatgtcatcactgactttaaatcgcttcataagagtcagctttaaataaattgtttcaagaaagaaatgggctgggctcggtggcttatgcctgtaatcctagcactttgggaggccgaggcgggcagatcatttaaggtcaggagttcaaaaccagcctggccaacatggtgaaaccccatctctactaaaaatacaaaaaaaaaaaaaaaattagccgggtgtggtggagggtgcctgtaatcccagctactcaggaggctgaggcaggagaattgcttgaaccccagaggggaggttacagcgagctgagattgcaccactgcactccagcctcggtgacagagcgacactccgtctcaaaaaaaaaaaaaagttcagtaagggcctaaataagttatttcaactgaatttataaaatcagagaaccttgggagcaaccatagaaatcatccagcctctacttgaacattgccagacatctccagagacagagaaatccttccacttcaaagtgattatggaatgattccaactgctcaaaagttctgcctttgtaagctagaaaccaaaactcgtatgcaaaatctgattttttttaaatgttggccactgattccaattttttaaaaaacctaataaagaacaagtctatggactggatccaaattttaacttctggataatttcttacacaaatttgaagacatatgtcacatccttcatttgattttctctttggcctaaagatcacatgggtcctcctacatttccttccccattcttctcctctaggtgtttcctagtcctttagagccctccttaaaaatgtggctcttagaagacacctttcagtgctttttaaccagagcaggtagaagaggaccacgatgttcttgatcattacccagtattgccaatgaatactactatgttgctataagtgccatatgtaaaattttttgagcaattgcatcatgctgttgctgggttcatctgagcctttaaatcttcagtaaaacttattagtaatcttttgtttgtttttagggtttggttacatcaacaattatttagtagatttgtctaatcatggattttataaacaagatctttaaccttaaagcaacttataatatttatttttaaaatttcagcttctggtttggattcattatattagcctgtcgagtacgatcctctaaaattttattccataattaaacagttaggtatctttcctagattctggccatttcaagtttgataaacatatcatcaatgataatgttgagcaggcaggattcctcaagcatagccctttacaatttgatgttgattgactgattaacactattaaataaaggcagatgatgaattacaaatacatctgatgatattattattcaacctttcatcttgtccataagaatgtcataagtcacttgagtcatttgatcaaatgttttgctaaagtttaaatgtgcttagtctgtcactaataatctcatcaaaatgaaagagatttaattttatacaacctatagaattttgtcagttaaagattggcccgattaaaaagtgggcaaaggacttgaatagacattcctccaaagaagatatacaaatggccaaaagcatatgaaaagatgttcaatatcactaataattagagaaatgcaaatcaaaactccagtgagataccatttcacacccattagaatgcactattaaaaaaatagcaagtgtgaagaaattggaaccattgtgatctgttgataggaatgtaaaatggtgcagctgctatggaaaacagaatggaagttcctaaaaaaaattaaaaatagaattaccatctgatgcagcaatcccatttctgagtatttaatccaaaagaattgaagtcggggtctcaaaatatttgtacacccatgttcactgcagcattattcatgatagccgtttaaggcagaagcaacccaaatgtccatcagtggatgaatggataaagaaaacatggtatatgcaaacaatggaatattattcagtcataaaaagaaggaaatcctgtcacatggtacagcatcatgaacctagaggacattagactaagtaaaatacaccagtcacagaaagatagatactgaatgatccacttatatgcagtacctaaaatagtcaaaatcagaaacagaaagtaccatggtggttgtcagggctgggggaaggggggaaatggggagttattcaatgggcatagagttttagttttgcagcatgaaaaagttctggagattggttgcacaacaagaataaatatatgtaacattattgaaatgtaaaattaaaaatggttaagatggtaaattttacggtattttttacaattaaacattttttaattattaaaaaagattagcccaattcttttatagaggaggaaactgaggccctgagagtttacagaaacttttagtgaacttgtgtggattccagttactaagatttttcccaaatgctcacaaatgagttgctctccctaacttattgtagttaaaaccttttctgcagggaaaattttaatcaatgtatatggcctattcagcatttttttttaaagaattcatttgagaatacataaggcaatagatcatctacttagtatttccatcatcaagtcaagagagtgaatgcctgggcccagcctgccaactgaaggcctaattacctctctctctcgccttccaggcatatgcctaaatcactggtgcaggcccctatgtgctaccaacctgcttattttatagttttcaagtaataaattggtagtgattcctgtttgttttctatggtttttaaatttttttcagtcaaggttataatttaaacttgtttaatttcccttgaattctaaggttctgtaagatttcttcccacctttgccatatttaaaaccagagccttttcttgttttaactcaaagtaatatcccagatgatgtttcactttattaaaagtacctctttaataagaaatcatgattactttgctttaagcttcagggaaagaaaggagtattttctccattatatttaattactaatcaaagtattgaatatcattgtaaaaataaaataggaatgtcagatgtgaactgtgataccaaattgtttgatttttaaaaggaaattaatcatgtgatctggactaagtggttggtttcaaaaatctcaagtatttaacttgatgtaactaatatgtgcatttcacttttaaacagttattccaaagtattaaaaatcttcaacattctaatttccagccgattttctctgtaatgcattggaggtgtccattaccctttaaaatgactagtaagaataatgtccattgttccaaagtgattttcttaaaatagtatgattcccaccagatattagtcttcattgaaagagaacttcggactcttaaggagaatgatgaaaaacaattatatatataatgttttagggtaattttgattagtaatataatttactagaagcactgaaggtagacaggcttgcattccaacccagactttgctactttgtagctttgacaagttatttttcctttctcggtcttaatttctctgtgtgtaaagtcaagataacaccaatgtgccttccgggttaaaatgaggaatacaaatgctcggacttcaaaaagaacctaggcagatattagttttctaatttttcatttggaaggctcattgttctatggaatatttttatagaagattttcagagccagcagagactgaatccccttctggccaaatgcagagagctgtgtagggaaggaagcactttgtatggaagacttacaatgggcctgaatgtgtttctgtcacttccaacatgaccatgtattgttctccttgattatttcacttggcaaaaagacactgggccccttgtgcttgttagcatatcctcagtgtaatcagaaggagccaagcttgactgtttaaaggattcagcttcttgaagtttgttctcctgcagacctacagggggatttgtcccagaccctcgtttacaatagaagaccttccatgaataatctgatagggcatgaatacagaatagactcctttgtttgccaggcaggtgaggccctactttctcttgttgctaaaaatctggcctggaaaaatgactagcattgcgttagtactaaattagcctcatcgcttttgtaatcattaccctcaaaatgatttcactgaaaaaccaagaataacaacagagactttacccccctagggtactgagaaatatgaaaatggtttataatgttaataataaccataacatccaacaactgtatggcaattttcaattatccaaggttctttcatgaacattatctcatttgattctcaggtgaaccaaataagattggtagagcagggactattattcctgctctaccaatcgtatttattccattgaataaatgaggaaatggagatcagagagattgtttcttgcttaagattatctagcccaaaacttttacctgtgaatccccctctagtctaagggtaaagggtaaacattgagtggtaactggtactagaatagatttgttgcttacagcaattctgtgaagtaggtattactcccattttacagatgagtttgcttggagtggcaaagggcctactgaaggtcacgtagataatgaaaaggcattattcagaggtttctgacttggtgccctgtggcagaccgtcttctactcaggtgattcctttctgtctatctataggcatgtagacacaatcattactggtgcaaccagcactgactacgacggcctccagtgatgcctgggttatatatttacctgtaacagtgtataaagcagggattttctgtaatcccagcactttgggaggccgaggcaggcggatcacgaggtcaagagatcgagaccatcctggccaacatggtgaaaccctgtctctactaaaaatacaaaaattagctgggcgtggtggcacgtgcctgtagtcccagctactcagggggctgaggcaggtgaatcgcttgaacccgggaggcggacgttgcagtgagccgagatcgcaccattgcactccagcctggtgacagagcgagactccgtctcaaaaaaaaaaaaaaaaaaaaagcagggatttcaaaagcatcacatttggcaaaacttcagtgttattcccttcctttcagatcaccctcatccttcctacctccatgaaacaagaggaaccctactatgagaaaataggggcaaaattctccaattattggcagtgaagtgtagtagctagaatggtgggcaaaaagcaagaccgacgatggaatcccagcttttgacttactagcagcatgtccttgggcaacttacttaaccactctgtcttccagcatcttcacctataaaaattaggataaggatgtcatctaccttatagagttggttgtgacataaaatgagtttatgaaaagcacctggtccatagtaataatagctaacatgattttgcaccagtagaaaatatttgataaatattaaaattgcgttttgttttgtttttttgagacaaggtctcactctgtcacccaggctggagtgcagtggcgcaatcacagctcactgcagcctcaaccttctgggctcaggtaatccttccgcctcagcctctcaagtagccaggactacagacatgcaccaccatgcctggctaatttttttaattttttgtagagatggggtttcgccatgttgcctaggctggtctcaaattcctaggctcaagcaacctgcctgcctcagcctcccaaagtgctgggattacagacatgacccactgcacccagcctaaaattcgtattatttttattctactctgtaaccagatttaacccctctccaggctcttctgagggctaactcacagggcacagtcccaaaaccaggttttggtattccttttgaataactgatatgccatatctcacctgccaaacagttcccaaacaaggtgtgtacaagtaaaaactacatatggtttattctcatttacatgtactagggtaactcatcatttaaaggaccttttgggtcttttcatcactatctttatacttccagtttagcatttacaggacatgtcattatctttcttctattttccttaccagacgatgagctccttaagggcagaggacatgtcatacctaattttgtattcccagtacctacaatagtgcctgacatgcagtagcttttgtttattgacttactgaatgagtggaagggtaattgaatgaatgcatggttaattcttttgtaaggtaaataatcatctctgaattttgtgtcaatttgagttttcacactttgagttttcttaaagatagctgatcttcgttatcagggcatgtcattatgtaacccctctaattactatcccataattctgtgtttgttttaccagtcaaataattcattaatgacaatatatgcctaagtatttggtttcaatggttaggctcaaactgataaaaagacaagtatgtctcgtgttctacacatattatattcttttccaagcaatgggatataagatttcaaaaatatacttcaaagtgttagcactcataattattgggctcatatgaaaccatttaagaattctggggtttcaataaagtgtcagattatacagtgctgccatgctggaaggaattatagacaccatccaaaacagacacttcacttttgcagaggtaaaaaatgaggcccagagacgtgaatatttgttcaaggtcacacagctgatcaaagatcaaactgaccctgacttcaggcccccatattctcaggccagtggctttttggacactgggaccaggattccttagtaatgttgattctggaagatgcaggcttggccccataagtccaaaccagccaagacaaggtcatgatttctagaacaccatcttgtgggggctgatctgggctggcagccaatggaagaagagccctgtggtccacattaaggctcttggatgtatacagtccattcacgtggcgtttaacttttaaggtgttagagaaatgtaggtctgccactaaagagaggcaacatcagaggaggacccacacacgtacaaagtcttcataatgtccctctgcagtttttaaacatttgaactttaaacttttaaacttcaataaattatgttgaaggtttgatggaaacaaatggtaataagcagtggattcctttcttctcacagtggatttgtgtgtataaaagaatagaagaggtggttcattttaaactatgcaatgtaatattatgcatgttactttaaagagtataacttttgctctttttcatttctgcacccagattcaaaggattccaaggagaagaataaaatggaaatcctgtacatactagtgccaagtgtggccattcccctggccattgctttactcttcttcttcatttgcgtctgtcggaataaccagaagtcatcgtcggcaccagtccagaggcaaccaaaacacgtcagaggtcaaaatgtagagatgtcaatgctgaatgcatataaacccaaggtaatgttagcagtacagagctacatttgttccgtgggcttcaagttaaagcaccatgttataaccctcccaagcttggaaatcgaatgatatggaatcagagttttataagtgctaaggttcattttaaccaaatgcaaagacgaactacctacctctatctaaaccaagacactttcatcagtatgtctacttcagtgttgagccagccatatcactgccttgccatagagtcattgggctagaagtgatccctaagaaatcatcctgaccagcccgtcaggactcagaacgtgagcaatttttcaaaatttcaaagaggaaatttcatacttttccatccaaattgcaagagagaacaagatccatcattgttcacaaacttcactgtcaagaaccttttcgttgcataatatgcaaatagttaaaaccactgtactatatacttaaaaatgattaagatagtaaattttgttgtgtttttttaccacgatttaaaaaaaatcctttgtatgcctaacttacatccctttttctttggcttaagtatattttaaggaagtgttgtccttccaatagtcttcgaatgctgttttatgataaccaaccttagccttccccactttgagctaaatcaaccccttcccttttgcttttcatccacatctttcaacgtttgagttgctcgaggtcctggcaaggaacccagggtcactggcccttaccttaaatggagcccctgcactgcatcttggaactaaaatacaacagagtctttctttcaggaaagccagcaccacaatcccaggcctctcagcaaaaagatttcatttaaataatttaagactcttgcatctaacagcctgtttttttttctaattattccaattccataagaacattcattcattcaacaaatatttatcttccctgtggactagtaactgtattattcttttgatcctcataaagaggagaagcatcacttttaataaaattttaggaaaaaaaagtcttcacactcaaattaactaatcctcttatctaataaatggagtagcgtaattgggctgacacagagccctcatttttttttctgctttactgtttaaattttttttatctaaaaaatcttgaaaagatttttgctattataaagtcatatttattaataggatttggaattccttaaatgctaaaaattcagtgtatatattctgtattcagcaaaaccactgatctcttgctgagtgtgaatttttatcattaaaaacaagcaaacaacaaaaaaaaaaccctacaaatcctgaagaccatagagttcacacagtagcctggaggatgggcagggtagggattcaactcttttgacatcccagcttctagctagctgatttacatatattatagcattttatataatatcacatttaatccttactacttagtgctactataaaagtagtgaaagcaaatggatgggggttaatattgctacacattcacctagttgacctggcagatacttttacctagctcatgacttcaagcttctagtgtaagagtcattgttccatgagactctttccctttcatttctgttggtaaatgttgagaagtcttagaaacaccagaactctgggcgggggagagacctagatcattttggttacagcagacggcagtttggtgcagtagccaccatcctggaaagatgtactcctcattgccagggcaggaaccatggaagaatcatttccatttttagaaattatcaattttgtgggttagccttaatctgcaattgaattacatttttagtggaggtttgttttatatcacatgatctccaacagaaattccagagagctttgtggcataaatagaaaaaaggctaatatatatatcgatgaatacaaactgtcaagaacaataccaggagcttttacatccattatcacacttaatcctcacagctattatataaggcaggtattattattactattgtacaaccagggtaattgagacacaaacagactaagtaacttccccaaggtccaagagctagttattagaagcaataaaatgtgaatacaggatctttcaccttttctaaatagagctggcccttgctcttgcagaatccgtgataactttttcacagaacagatcaagttgggaaggaggagggagggttaggcaagcaactgagtgtgatcccatttggtcagtttgtgcttcagagtaaccacaggcattctcctggcttctgacaaatatttaaggggcctgcatggcagtctctgaatgatgtagccctagccctgccagggacatgtacaatttggctagagcaataatagttccccatccttcatggtcagagacaaatgtgaaatatactggcatgagttttcccagagactgggtgaagtaaacattgttttcatagtttctggatcatttctgaggtgtgccttgctaaatctcccagtgtcaagatttgtccactatgaggcttagagcttagccttaaactcctgaaccagagaagtagaaatggcttaaatatttgaatgggttggggaggggaaaggaaacaacaaaaacaaatgctaacttttttttttcttacacttctaagggacttggctccgatcaaatttgagttattcaattgtttgttttggttcttactgagtgcctttcctggaaaaagcacaaaggactctgtagaccttaaagaaaattcctaaatgtaaacagaaaatctctaaaactgctttggaaggtcactgacacataaatattacatgtacctataaaatctaaaaggaaaggacacacataagaaagaaacaaagaaaagtcctgaaaacaaacactccaccagagcaaaatcaaaagaatatttggaggcgaggatgaaaaaggaatgaaggatagaagccagtctgccctagccttattcttttttccccttggccaattcaaaagtcagagactctagggttcttatttatccaaatgaatgtgcccttcagggtttaaactctctgcttccatctctcttcacttgctgagccgctaaaattctcctgagtgtttggattgagaagaagaggctcctgtgggagattagaaactgatacccttgagagaggacaatagggagctgccgacagactggctgacgaggcccggcttgggtccccagagaggtaggacagtgcagttggaagtaaaagcttttgatgagccatgagtttccttctgatctgtgggcaaaggaagccagtggaccagagaggcaccttaacgccgaacaatcaggaagatggagatgtcctggctcccatgccaactgctctgtgactctgagaagccatctagctttttgcagttcaattttctcagctgttcaggagaagaagtagactgcattcaagtataagactgtttattttcctgttattttgtttagccaaagatttgaagccattcaatcctctaacgagtactgtagtgttgcctaaactaagcaggattttctatattgcattacaaattttacaatctgagtgaggttgttttttcttcttttagtacagcagaaattgaaccttctcagaggagcctggaaactctaaattcccttctctgtttcttttcctttgcttctccttcccttgcccctacatcccctgccaggtatgactctggaaaacagcattctgtaagcttgcttgggtaagggagagaagctgtggtatgtgctactgtgggagcagggagggggcagagtctccccttcaagaacaggatgggtcccattcagcccaggcctcctggctcctcacctgcctggaggttaggcagacagagaggttaaaagatggaggagtctgaggggcatggttgctcacacctgtaatctcagcatttgaggaaaccaagctggacagatcgcttgagcccaggagttcaagaccagcctgggcaacatggggaaaccccatctctacaaacacacacacacacacacacacacacacacacacacacacacacaattcgccaggcatggtggtgcatctctatactcagagctactcgggaggctgaggtgggaggattacttgagcctgggaatttgaggctgcagtgagctaagatcatgccactgcactccagcctaggcaacagagtgagactcatctcaaaaaaagaaaaaaagatggaggagtctgagaatgggggcgaggaagagtcaaggcaggccaggggtgtgagatgcagccaaagcctggacagcccccatgagtcgaactcctgcagctcctggctgatgtaaggaacatcgcaggggaaagaaagcaagactggcccagctttccaaagctgatggctgtgttttacttctcaatttaccctcatctcttgccagcttctctcctttttcacttccagacaattcatctctccgttttcctttccagccaaagtagttgctgaatatactgaaatttgattacattctctggccctgtcccttttgccagcaacatgcttccatctaaaagccctgctggagtctggctaccctttttaatttgctgttcttaccaaatgtcaccacacttcatgctaaaatatcctcgataatttttccactcactccttaaagctattgtctcccaacacttctgagctcaccattctattaacatgggcctcttgggaagcaccagtgatgttatttaatccagtgacctttgccaagtcttcctcccctttaatttctctggagcctttgatattcttaaccaccatcctgaaatatatttttttttccccttgactttcctcctatctgcttcccacacttccttcactagttcttttaattcccttaatgggagcatcctctgacattcttttcctctctcattctcttgagctgatttcatcctctggcattgctctagctcccccttgagtgtaatgatttcccaacctggaaggcccagtttcaagttataaaattcttgccaccaaaatcctgccacccaaaagtccatactatcggggcctagcttacctttccagccacacttttctcttagtttatttctggaaagtagtctgatacacttcaaagagcaagagtgtagagacaaagagatatgattacaaatcttggctctgctgtcaactggccacaagatcttaagcaaataactaacttctctgaaccttttattttctcatccataaggcaaggataagaatagtacttaaaagggatattttttacactttgagatagcatgtctggcacctcacaggtacttaataaccagaaattactattattgttataactgatgagtacagatcttttttttaacttttattttaagttaaggtgtacaagggcaggtttgttatgtaggtaaacttgtgtcatgggagtttgttgtacagattatttgatcacccaggtattaagcccagtactcattagttatttttcctgatcctctccctcctcccaagctccaccctctgaaaggccccagggtgtgttgttcccctctgtgtgtctatgagaacaacatttagctctcacttaaaagtgagaacatgcggtacttagttttctgttcctgtgttactttgctaaggataatggtctccagctccatccatgtccctgcaaaggatgtgatcttattcttttttatgtccacatagtattccatggagtatattgtatgtaccacattttctttatccagtctatcactgatgggcctttaggttgattccatgtctttgctgttgtgaatagtgctgcagtgaacgtatatgtgcatgtgtccttataataaaatcagttatattcctttgggtatatacccaggatttaaattgctaggtcaaatgctatttctgtctttagatattttaggtttccacaatggctgaactaatttacactcccatcaacagtgtataagcgttcctttttctctgcaacctcgccagaatctgttgttttttgaccttttaataatggccattctgactggtgtgagatggtgtctcattgtggttttgatttgcatttctctaataatcagtgatgttgagctttttttcatatgtttgttggccacacgtatgtcttcttttgaaaagtgtctgttcatgtcctttttatggggttgtttttctttaaattccttagaaatgctggatataagactttcaccggatgcatagtttgcaaaatttttctcccattctgtaggttgtgttactctgttgatagtttcttttgctgtgcagaaactctttagtttaataagatcccatttgtcaatttttgctctggttttgattgcttttggtgtcttcgtcatgaaatctttgcctgtgcctatatcctgaatggtattgcctatgttgtcttccaggatttttataatttcgggttttactttttttttttttttttttttgagatggaatctcgctttgtcacccaggctgaagtgcagtggtgtgatctcagctcactgcaacctccacctcctgggtttaagcaattatcatgcctcagcctcctgagtagctgggactacaggcatgtaccaccacacgtggctaatttttgtctttcttcatagagatgaggttttgccatatttcccaggctggtctcaaactcctggcctcaagtgattcacctgccttggcctcccaaagtgctgggattacaggcatgagccactagggttttacatttaagtctttcatccatcttgaattaatttttgtacatagtataaggaaagggtccagtttcaatcttctgcatatagctagccagttatcccagaaccatttattttactagggaattctttccccactgcttgcttttgtcaggtttgttaaagatcaggtagttgtaggtgtgcaatctaatttccgagttctctattctgttccattgttctatgtgtctgtttctgcaccagtaccatgctcttttggttactgtagccctgtagtatagtttgaagtcagctagcatgatgcctccagctttgttcttttttcttggctatttgggctcttttttagttccatgtgaatttttaaatagttttctctagttctgtgaagaatatcaatggtagttgagtaggaatagcatttaatctgtaaattgctttgggcagtatggccattttaatgatattgattcttccaatctatgagcatggaatgttttttcatttgtttgtgtcatctctgatttctttgagcagtgttttgactacagctcttttaatgaagcaaatgctgtgcaaacatagattaatgaagcaaatgctgtgcaaacataggatactgtgggctggggaggaagctataggatccagcaatgcacagcattaactggggtgaggacacaggcaagagaatcccagcaaagattatagaggtagctctttggacagctctcgtattccttgtgtccatcctgttagcatacattctcctgccccacaccctgctcacatcctggataaaatccatcagggtggagaaggtctgacagtgagggctgggaggctgcccggtacataacctcagcttaaaccaatgtctatagaaactctacttctgggaaaaacaagtcctataaatgactatattataaattggcatcataaacggactaaagtacttcaatatctcaatagaatctttgtaataaccctatgaagtaggtactaatttaagtctgatttttaggatgagaaaactgaggcttcagattcagaattggcccaaagtcacaaattattaagtgacagagccaaacttgaacccaggtctgctcaggtgcagagcccagtgcttttctatttgcctctactgcctttattttcaggctgactgaaatatatgagcccaagttatgagcacgtgatggctcaagctgacattaaaattactggcatctgttctgtctatttccaggcagaatagaacctctcccattggcattataaagtaactcaaccacagaatcaaccctgctcaccaccaaacattcaagctaactatcagaaagttacgttatagagaaaagaaatgcttctgaagttaaatcacttccagagaaatgcagctgaactccaagcaagtgtggcaaaatattggttgaaactccctctagaacttgattgcataagccagaaggcacttaatccagctgtagtctttgaaaatgtccataacctcccaaaacaaaatggctgtggcctctaagcttttaaaatgtaatcatttccatttatgagtagagtcaattgtttcataattctaacactgtttacctaagaaccagtaaaatgcacaagaaaggaaaataggttttggagtcaagcagatccatgtcaacagccaagtctaggtactaagaaatcttacatctatatactctccagggctctcatgctcaattcaggtgaaggttgccatggacaggttttgttcatctatcccagtcaactagctagcagagacaacagagcatcaacggagtgaggtctaactcaaaaaccagagagctcttataccttgagcatttcacttttgcatcaatggtcctcatgcttttaaaatgtagagtcctttgaggatcagatggaaagtctgcctcctcttcccagaaagctctgcaactttggtgtcagacattcttggatttgaatcttggcatcaccacttaatagttgtgcttctttaggcaggctacttaaccactgaatgccttatgtccttatccataaaatgggggcagtcgtaatatgaatctcacagaattgtgataaggattaaatgggttgatgcattaagcactttatgtccgagagcagacaaggagtatagtgtggtcattagcaaggcaggctctggtgtctgaattgaccacctaccagctgtgagaccacttaactgacctgttctttggtttttccatttgtaaaataggtgtgagtcatagttaccaatctcatggggttagtgtgaggatgaaaggagctaatatgtgtaaagtacttacagcctaacatataagcattcaaaaaatcatagccattattaggatctcagtgtctggcacatggcagatatttaataaatggtaggtattgttaaattcagattacagatatctaggataggagccatgtcttctctcttcatggttctttcatggcccctcatatagtagtctgtatgtatattcttcagtatattgtatatacagtatcagttgactgactgatgcaactagctattaaaatatatcctaaatgattggctctaattgaaactaaaggaaactggtgatatggcccaagctatgactacaagtagtcatgtagtatataaacctaataaatgctggttaatggttcttatatttttctctacctgatatttccaaagcatcttttcaagcaagagtattgttttctctcagttggataagtttaaattgcccaactaggttcatcagacacattgtggtcattcatcatgcagagagaagggacccagatcactaaggaattgactgatccagaaaactacatccatttattccaggggctctcaaagtgaggcctctaggccagcaggagtctcctcaactgagaactgtcagaaatggacaatctcagacccacataggaactcttgaggtggagcccagcaatcccagcaatctgtgctttaacaagtggcactgatgcctgctctgatgtagactatgctggtcagtacttgagattcaggaagcaagtcagcccatagggaataccaatctcagagaaaactgtgcttccaaagagaaaaaggacctgggatagccctcctattaccaaaaatactcctctaattttagtagggccagggtctgctcatcattcctctgatggggtgtattagtctgtttgaacactgctgataaagacatacctgagaatggaaagaaaaagaggtttaatggacttacagttccacatggctggggaggcctcacaatcatggcagaaggcaaggaggaccaagtcacatcttatgtggatggcagcagacaaagagagagcttgtgcggggaaactcccccttatagaaccatcagctctcatgagacttattcactatcacgagaacagcatgggaaagacctgcccccatgattcaataacctcccactgggtccctcccacaccatatgggaattcaagatgagatttgggtggggacactgccaaaccatatcatttgacccctggtccctttcaaatctcatttccttacattttaaaaccaatcatcccctcccaaaagtcccccaaagtctcaactcatttcggcattaactcagaagtccacagtccaaagtctcatccaagacaacgcaagtcccttctgcctatgagcctgtaaaatcaaaagcaagttagttacttcccagatacagtgggggtacaggcattgggtaaatacagccattccaaatgggagaaattggccaaaaaacaaaggggctacaggccccatgcaagtccaaaatccagcagggcagtcaaatcttaaggctccaaaatgatctcctttgactccatgtctcacatccaggtgactctgatgcaagcagtgcatcagacacctctgcacctttgcagggtagagtacccctcctggctgctttcatgggctggcattgagtgtctgggacttttccagactcacagtgcaagctgttggtgggtctaccattctggggtctggaggacagtggctctcttctcacaggtccactaggcagtgccccattagggacttgttatggaggctccaaccccacatttcccttctacactgccctagcagaggttctccatgagggcctcacccctgcagcaaacttctgcctgggcatccaggcatttccatacatcctctgaaatctaggtggagattcccaaacctcaattcttgacttctgtgcacctgcaggctcaacaccacatggaagctgccaagccttgggacctccaacctctgaagccacagcacgagctgtaccttgaccccttttagtcatagctggagtggctgggacacagggcactaagtacctagactgcacacagcagagggaccctggtcccagcccacaaaaccattttctcctcctaaacctctgggtgatgggaggggctgccgtgaagacctctgacatgccttggagacattttccccattatcttggtgattaacatttggcttctcattacttatgcaaatttctgcagccagcttgaatttctcctcaaaaaatgggattttattttctattgcattgtcaggctgcaaatattccaagcttttgttctgttttccttttaaaactgaatgcctttaacagcacccaaatcacctcttgaatgctttgctgcttagaaatttcttccgccaaataccctaaatcatctctctcaagttcaaagttccacaaatctctagggcaggggaaaaatgccgccagtctctttgctaaaacataacaagagtcacctctgcttcagttcccaacaagttcctcatctccatctgagaccacctaagtctggatttcattgtccttatcattatcagcattttggtcaaagccattcaacaagtctccagggagttccaaactttcccacattttcctgtcttcttctaagccctccaaactgttccaacctctgcctgttacccagttccaaagtcacttccacattttcgggtatcttttcagcagcaccccactctactggtaccaatttacaatattagtccattttcacactgctgataaagacacacctgagactgggaagaaaaagaggcttaatggacttacagttccacatggctgggagcgcctcacaatcatgacggaaggcaaggaggagcaagtcacatcttacgtggatggcagcaggcacagagagagcttatgcagggaaactcccccttatagaaccatcagatctcatgagacttagtcactatcacaagaacagcatgggaaagatctgccccctgactcaattacctcccaccaggtccctcccacaacatgtgggaattcaagatgagatgtgagtggggacacagccaaaccatatcatgaggcaagcacaaatgccatgtgaaacctgctattcttctgtagacacttgtgtccagccagaatcagcttcaaaagaatagcatagatttgaaaaagggcagcagtcagtcttgggacattagaacatggggaattaactggccttgagtgaaagggaccacagggggaggtttggagctgacttatgaatatggatcctgtttcagcacctactgttgttaaagccccgtttctgtcccagagaaccaccctgggctcgattccctgcaccctaatgtagctctgtttttcatctgtgtgtctacttcaagttagactcaaaagtagagcaattatatgacattatgttcaaggcaaaaagtgacagagcaggcttcatgttgcatacaaatgttggcagctattgcaaaatcctcaccgcatatcctatggtaatcacttccttaaagtaagcaggaaataggttagtagtaggctgcttcaccaggagtcatttcaaatgtattgtcacctaaggtataacttcccaaagatggaaagagataaagccactgagtctgccctctttatccatctacagccaccaaggtaattacagtttttaaaaacgctactcatagttcattgctttcatatctaaagttaagagatctaaaagttcccccacatccccacttagcagtcatgactaaggtgaaaaaagccaccagtatcagcctggtctctcttatcagcagtttagaaagtactacaattttcccatctgactcacatctaaatgactcgcatctaaaatgtttttccttaattttccttccgtaaagagttcatttaaactctaatactgttgcttttcaaaaatttctaaagaaagaagcatcttggaacaatgtattaacttctgcatcaacttttatttcatataataattttatataattttttaaaggcagatgtgtgtttactttgagaagtaaaaatgttaacattgaaactgaaagcctgtttcagttttaaggtacttaattgccttacagcatataataaaccgaggccatcttgtccttcaactaatggagggagtgataaagagataggagcccgggaccctattcattccagttttcctttgtacttggtttactttggcaccatgcctcatgtgtattttacacttctttacattttgtacatccctgtatgacaaatacttgtcaaacaaaaactaaacagatttataaccccttaacttgaaatgagccaaaattgaactgccaaaactttatgacttcattttctttcatagttttccaccacattggttcaaacagacaaactccacttgaggtcaagcagaggtcatttcactttcattactaaaatataatttacaatatgccagacctaaacaagtttagcctaaagggtttgtataatgtaaaccatctgttcctcaacaatacagctaatttcctgccatcaccgtacagtctactgactgcttctttaagggtttttatgattttttaactagttcaggatttatgtaaaatttgaaaatgagtctatagttaggattcatttgtaccaagtaacttgagcaccttaaaaatgcaaatcactgtggaaattgttcccctgaaaccaagctaggagcattttttttctgggcacttctttgctggcagctgcacaggtgttcgaagggaagattttgtggactctgccattttagatgctttccatgcctctttgcaaagcaaaccccccaaatttagttttcagtagctctagtaaatgactccttggagaagacttgggattatatgctatatggcccactggatattggtgagataggacaagatacactttggggtaaaatctactttctttcatgtgtctgaacagggaggaagaacaattataattccatagagtgaccacatactgaaggctaacctagctctgtgaggtggcaggcctctcaggctgagcctccagagacattcggcttcaatctgggattgctggccagcaggcttctctggtttcaaacagaatgctggggccgaaaaacagagagccttggagttgcaagtgtggctctttcggctctcctgaaaattcttgatactttctttagcccctttctccatctgtaaaatagcaaaattaggcgttctgtttccaaaggcaagtatatgagaacaaatttgcttacctcagtggaggggaatgcagctggccttcttagccacgaagccccaaggccatgtgtagggctgatgccaaggtcctgtccacctcttcctcttttcccacctccagaagtttggctggcttgcttcctttacccatctgctaccatccactcttccacacgagttcttgttgccttcaccttcattcacatctcagaggagccagctacaggccactcaacttctcacccaccctcaagctccaaaacaaattccctgtcatttttaaaggattttttttttttaactagcaactacaggagaacagagaaagattaacaggaagaaagttaaacactctgcaactacttaaggcttaaatggatctaaatcatttgcattactttacttcctggatgactttcctaataaggataataagaatgatttaaagggcacttattaggtgggaattacgttcatacatcgttgtatttaattcctactgcaacagctcaagctagatagtacattagttcatagatatggaaacagaggttcagaaaagttaagaaattcacccaaggtcagtgattaatattataagacctatgccacaggatcatggtgttaaataagttaatatttgctaagtgcttagaacattatctggcacaaagtaagtgctatgtaagtattaactattattcataaaaagcagcagattcaagatgcaaacccagatttataggagtccaaagctcacttagtttgaattatgccatactgcctatggatacttttcaagcagtgaaggaggagagggtattgggtttctaactcctcattataccagcctaatattccatgagtttacttcctaattcccattttccacaaagaagttttagtactcagtcccttaaagttctctgtctccaaaagcgtagagatcttatttttgtcaaaaagtaagtgatgtctactttgccattcaagggaccttcacctaaactggatttatttacatcattaggaaaagttctcatggaaatctccaatcttaatgtcatgcaggaaaaattcaccttgagttactcttgccagcaaaagtaaaatcatctgagtgctacaagacaaaaaaagtagggttggctcaactggttacctttctcatcacccacaccttgctctctcaaaggaattctacaagctcccacaagaatacagaccctaaaagcaaaaggaaaaatggtggatggacttacaattgcaaaagatatttcctagttcagtaagatgggaagattcgcctattgtttttttttttttaaaaaaatagttatttaatttaaaaaaatagtaatttaataaattaaatagttatttaatttaatatattcacctggttgaaaaattttaaagcatagaaaagcagaacctctgcccccctttttctagtttctacttccatacccccaataatcactgctatctatttcccaagtatcctttcgtagtttctttattcttatacaaagaaatatgtttcatgtgttctttttctccttctctcttacacaaaagcagcatccagcattaactgttctgttgctttttatttttagctgagcaaaggattttgcagaccttcccataccagtacatacgaaacgtcctcattcttttttttcaaatgtggaatattctatttactagctccactgtaattgatttaatatattctctatagggacatggaggtcattgataatattttgctattacaaacaatactatattgaatagaactagatcaataagatttaatttactgaaagtttaaagcaacaaattaccattactttcagcacaagtaaactttctaaaactcatttccaaatataaacctcacaaaatctgctttgatgaacaaataagaccaatttataatgagacagtttatttgcatagaataattaatgttccaaaatccccaatcccaatttgtccttttaagtgagtattttgctgcaagtttatttacacttacaattaggttagtgggcattttgccctggaaaatatcagcctagaacaaatctaatcatcatgaattctaaattagtagagtttggataagagaacttttttaccaaattatctaaactgttgttttaaactctgtacagagagctctggatttcatatgtatttcaacattgtcagtttcagttagaattttcagggtagtattcttttttaaaaaataaggatttgaaggatggggattatttgaaaaatcagttgtatgtaaaatgcattgtttttattactttcttttctaacaaattaaatgaaacatcagactaaatttgaggtacattttaaaatagtaaaaacatataacattatagacatttacttgccaagatcaaatgtcatgattcaatacttattttcattgtgagctaatgccttcacctgtctgtcttaaggtcaattaataaacaacccacttgcgaagacctagggatatacgttggtatgaagggcagtgcttccaataagatttcccttgaaatctcgttgtgaggacaaaatacatgcataaaaagaacagaaacatcaagttgataataataacaaaaagttaaatagtacttaccatgggccagacataggtctgagtgctttacaaactttaactcataggtctgagtgctttacaaacattaactcattaaaagtttgcaataacatggtaagtacaattattatcatcccattttatagatgaaggaattgaggcaaaagttaaatgttgtatctggggtcacacagctggtaagtggagaaggcaggattccaactcagactggctatggaggccacttgtgtaaccagccaccacactgctttgtgtatgtggtggcattcacagtaaaggcaaaagagtctagcaaagaaatgaccatagtggtcagggaaggttttgcgggaagtggggcctgaaacaggctttttagaaaacaaaggatttaatcaatggagaagaccgcatttcagaccttcccatctctattgtgagtacttcagaaggacaatcttttgttttggtttctcttttagcacaataaatattcgaagaatggcagaacattggaggaacaaaagtattaggcaagaatgtaaatggtttcaggagtggacattgagaaaacctatttaactaaagtgatgccatcacacagagaagtagcaagggatcatgtcaggaaagtgagttaggaccagattacaaatgctctgagtaccaggctgtagcctctgtggtagtgcttctgacaccctaatcttcacagaaaccactggggtcttgttaaatgcacatgcagattcagtaggtctgaggtgggcccaagagtctgcatttgcagtaagtttgggtgatgctgatgttgctggtccccagaccacagtttgagtaccaagactctagacaacagcaaaaaaccattttgtggctgggttgagggaaagggatagggtagtgatggaaagttgtctatggcacctcccctgagttgcagccaacgatttgaaagatatatagacctacaatattttattgaatttgtttatagaacctttttctatatgccccgtccctcctttcggatgcaaagctgtcttgcctgaagatatgttttaaaccacgtttttcctctctttcatacagagcaaggctaaagagctacctctttctgctgtacgctttatggaagaattgggtgagtgtgcctttggaaaaatctataaaggccatctctatctcccaggcatggaccatgctcagctggttgctatcaagaccttgaaagactataacaacccccagcaatggacggaatttcaacaagaagcctccctaatggcagaactgcaccaccccaatattgtctgccttctaggtgccgtcactcaggaacaacctgtgtgcatgctttttgagtatattaatcagggggatctccatgagttcctcatcatgagatccccacactctgatgttggctgcagcagtgatgaagatgggactgtgaaatccagcctggaccacggagattttctgcacattgcaattcagattgcagctggcatggaatacctgtctagtcacttctttgtccacaaggaccttgcagctcgcaatattttaatcggagagcaacttcatgtaaagatttcagacttggggctttccagagaaatttactccgctgattactacagggtccagagtaagtccttgctgcccattcgctggatgccccctgaagccatcatgtatggcaaattctcttctgattcagatatctggtcctttggggttgtcttgtgggagattttcagttttggactccagccatattatggattcagtaaccaggaagtgattgagatggtgagaaaacggcagctcttaccatgctctgaagactgcccacccagaatgtacagcctcatgacagagtgctggaatgagattccttctaggagaccaagatttaaagatattcacgtccggcttcggtcctgggagggactctcaagtcacacaagctctactactccttcagggggaaatgccaccacacagacaacctccctcagtgccagcccagtgagtaatctcagtaaccccagatatcctaattacatgttcccgagccagggtattacaccacagggccagattgctggtttcattggcccgccaatacctcagaaccagcgattcattcccatcaatggatacccaatacctcctggatatgcagcgtttccagctgcccactaccagccaacaggtcctcccagagtgattcagcactgcccacctcccaagagtcggtccccaagcagtgccagtgggtcgactagcactggccatgtgactagcttgccctcatcaggatccaatcaggaagcaaatattcctttactaccacacatgtcaattccaaatcatcctggtggaatgggtatcaccgtttttggcaacaaatctcaaaaaccctacaaaattgactcaaagcaagcatctttactaggagacgccaatattcatggacacaccgaatctatgatttctgcagaactgtaaaatgcacaacttttgtaaatgtggtatacaggacaaactagacggccgtagaaaagatttatattcaaatgtttttattaaagtaaggttctcatttagcagacatcgcaacaagtaccttctgtgaagtttcactgtgtcttaccaagcaggacagacactcggccagaaaaaaaaaaaaaaaaaaaaaacaagcaaacaaaaacattgtgggatgtgcactccattggagtgcatgacatggcattgggattggaacatgtggtttcgagcactgaaagctgcaaaccagtgaagaggaaaagaaccttgtgattaaatataaaaccaaaagtcaaatggtgctttgtgttttagccttcagtcaccatgactggtctctcccccagatgtatatataccatagcatttgtctacctgctgtcttttcttcaggacagatgttcaggaattatattgattgaatttagactctgtgcatgttcttatggaaatgatgttcagaatccatgaagaaacttcaggccaaatttgaaaccctggagggaaatgagccataagggaagtataacaagccctgaagccttttatgtcgttgtgcttctttgggaaggtgtagagtgtgcctttttgtgaatcctcctctgatcatgagggtctttcccacagtttctcacagtgtgtttacactgcccttggaataacacagcgcatcagaccataagaaggctagatgtggatgctagaattgattgttggttgatagttctctttgctggattaggaatgaggcgccaaaggaagcacagccaggaaaatggccccacagcctagatcagcatctgtgggaaaggaaaaagggttcccatggggacagcccccataggagttttctggaaccagtaacactgaaaaataagtgtgtggctacagatgagcacgcccaccccttgcaactccctgtttacaagttgtccgaggcattggagtgcttatggtcaatgggctctagggaagtaggaaactccatcatgatacaaatgtctagtaattttaaagtttctttccctttttttctgtgctggaaatgttcacagatttgattcccgccccaagaattacaacaatgtattcatacagtcagttggaatccaaaggcaattaattctattttgcaaaatatgatggtcttcctaaaaaacaagtactgagttctcatttcaaaagttaccaagaactgaattctttaaactagcaaaccgaagtaacatgaccatttttgccttagtgggaggtttcaaatgtgcagctcatggcatttacctgccgaccatcttttgccaagtttagaattcttatgcgtttcaagttctatatagaaagtaattttacttttgatttttctcttgttaaaaaaaaactcctttattctaagaacaatgtctcaaagtctcatttttactttaaaggtataagagacttctaaagagacttacgggatataaaagtaattcctggaaatgatatttgatgaggagaatgtaagagaatgaaaaacacattgatgttttcatttttaaaaaatacaactagcatgagaaatcaagaaaatatgtttaccaaaatgcattgcaattttcccaaacctgagtcttcaaataacaaacatgaacttataggtactgtgaactagaagaattggttatatccagatttctgggagataaattaaaacatatttttgtggcataaataagctgattcagaagttacatttcttaactttaggtagaggagaatatttgtatccttttgttgctatgcaactgtttaatgatgaagcttcaaaccacaattttgtatatcatatgacaatcaattgttttccaagaatatttattattttaagtacacaatttcagtgaatcttgagtttttctaggagtcccttaaagggaaattagcattccatgagccagtaaaatacctactctggtaaaacattattatggttaaaaagtaaattcaagttagttttttataaagaactataacatttattttaaacattttataataactgaaaacattaaagtgagcaaatgaaatttcaaaaccacttgtaataatgtattttataatcgcactgtgatactatataacacagtctcttttgtattaaaatagtatttttttcacaagctgaaaaatatcttttcctttgttgacaatgttttgtaagatgactttattttcagatctttttctccttttttgcacaaaactatgcttatggtttgtgtcacagaagtgaaaatatatctttgcatttttatatctggtctgtttttcttgtttcctttgtttttaacttgatatagattttcttcaaatatataatggcaattttcagatatctcaccttaccatatctttccttattttcactgcatgcatttaatcactgtattacttaatgtttgatttgttattatgggcatttcaaataggcaagcattgaattgtaatgacaaaaaggctattttatattaaggatatatgcatttgtatttcacacaccagagatgatattaaacactgattattttatgctgctgtttattaaaaatgtttactataaaatattatttcctgaatattgctgtcatagaggtatttggggattttaacatttacattttatagaaagaggaatcacaattcctatttgctgttatttcattaaatttttttttttcagtaggcttttaaaacagacttgggcattattttgctagcaaccataggtggagaggggaatcctaatgatttcataactgaatactatccacctatatatggcaagctttgaatttttaaaatcaaaataatatattgaatagttacaaccaatggaatataaaaaatatttgattttaagaatatagttgcatcattttctgccttaatatttccatataatcttagatatcaaaagtcacctctttggactctaaagaagaagaggctgtgtacatcttatcatgcccaacttagcttccaaacatactgataaaataaatggggccatttaattgtcacaacttatctttatgaccttatttgcccaaaagaaagagttcctcatctggcaattaatacacatggtcaaggaaaatgagtaccataatgaaagttcaaagaagttgtccatatctgctatttaacacagaaaggaatacaataaaacctttagggccttatccatctgttttaggtacagctcttgtcaccacctcaacaatcaaactcaataaagcaatcccttcacatggcagtgagatccgtgtcaggctgggtttctccctctcacttgaattcctcagcctgccttttacccccatttccttcttttatctcccagctcttgaccctcctgccatccccaatcccttcaactctgagattcccttaattccctaatcaccaacatctgcaaactcctagcatcaccttcccataatgcctactacaatactgaataaagaggagctcttttatccacacatcttctaagatgattacctatcccagtacttctcaaagtgtggttcccagagcaaagaaacagcggcaccctggaactggttagaaatgcaaattatcaagccctactttgaagtactaaatcaagggatccacgggagatgctaggggtgaagttcatcctcttaatttagacagcattttttttttttcagctaatagctcaaatgctaaagaggaaatcctggggatgagacccagaaatttgtgttttagcaagcctcacatgattctgatatactctaaagatcaagaactgacttaatttaaaggcacgggggtgggtgatcattacattcttttgtttgtttgtttgtttgtttgagatggagtctcactctgtcacccaggctggagtccactggcgccatctcagctcactgcaagctcagcctcccgggttcacgccattctcctgcctcagcctcccgagtagctgggactataggcactcaccaccgcgcccggctaattttttatatttttagtagagatggggtttcaccgtgttagccatgatggtctcgatctcctg

SEQ ID NO: 521 - DNA, 744019 bp, Homo sapiens
  source 1..744019: mol_type = genomic DNA
ggcaacatttctacaattcaattttaatgacttctaaagcaaaaatgacaatctatgcattcaggatttctctccttctgcactcagggaagataggactaatcagtcatggcacccttttcctatgagacaggaagcaacttcagaattctcagttctgcatttccaagagtgactgtcaatcagtgggtgttatctcacaagttaatacctttttctttgccttctctgatcaaaagggttgcttgatccttttaaacattattttccctgcaaaatggcagcaaataattttttttttttttttgaggcagagtcttgctctgtcgccaggctggagtgcagtggtgcgatcttggctcactgcaacctctgcctcccaggtccaagcgattctcctgtctcagcctcctgagtagctgggactacaggcacgtgccaccagcctggctaaattttgtattgttagtagagacagggtttcaccatgttggtcaggctggtctcgaactcccgacctcgtgatttgcccatcttggcctcccaaagtgctgggattacaggtgtgagccactgcacccagccaataattttttaaaaagtgcctggccaataattttttaaaaagtgctacactggccaggcgcagtggctcatgcctgtagtcccagcacttttggaaagacgaggtgggcggatcatgaagtcaggcgtttgagaccagtctgaccaacatggtgaaaccccgtctctactaaaagtacaaaacttagccgggtgtggtggtgtgtgtctgtattcccagctacttgggaggctgaggcaggagaatctcttggacctgggaggcaggggttgcagtgaaccaagatcgcaccactgcactccagcctggcgacagggcgagactccatctccaaaaaaaaaaaaaaaaaagccaggcacggtggctcacacctgtaatcccagcactttgggaggccgaggctggcggatcacctgaggtcaggagttcaagaccagcctcaacatggagaaaccccgtctctactaaaaatacaaaattagccgggcgtggtggtgcatgtctgtaatcccagctactcaggaggctgaggcaggagaattgcttgaacctgggagggggaggttgcggtgagccgagatctcccgccattgcgctccagcctgggcaacaagagcgaaactccgtctcaaaaaaaaaaaaaaaaggtgctgtggtatacaccggtgcttctcacactttaatgtgcatacggatcacctgggatcctataaaaaggcagattgatttagtaggtctgggtagtgctgggattatccagttccaacaaagtcgcaggagatgccgtgctgctagtctggaccacacttacctactctctcctagacccttcactagagacaggatgtaagctaggaaactatgtacagtccaattcaataaccaagaaaaaagaagaaaaacaaggcaagtgttccattagaagctgaagttttattataggataacagtacataaagcacatctaaaattgatgtgttcaatgcacttttaataaaggtaatgtaatattaaaggtacagtttctaagtacaatataacaacattcatattagaatgaaaattggagtatttaaaagacaacattaaatctctcttttttgtacagcttgtatttacaaaatgaatcaaaatattttttttttaaattcaggactcaataaaataaacagctggaaataagcagactagtgtaagagtgaattgaaaagaaaacccaaggtaagtgaaaagttggacgatcctctaataaagatcattagcaaagttttagttcaatactagttttaggattcccataaatggcttgcatttttagtgtggcagaaaaggagtttttacatactgtacacaaaacagacagcatatatttataggtacagtattactgtttccaaacttgcatgtatatttacagaaggctgagtttgtttactcaaacagaagtttgtgaaatttgtgtgcttaatcctcaagacctacacacaattagaatcagcatttcatgtggtctttttaaatgtggctttaatacttggttgtagaggagaatgttaaccgtaaggcttggcttactttgtaaatttaacaaaacaacccaggaaaaacgttttaattggggcacacttgttatcatttaacaattgtcaaatgctgacatgtgctagccattgtgcagacgcaaaaagatacaatctctaccctcaggaagcttaggatgctaaatcgtgctttaaaaaaaaggtttcaatctctttccaagagaggcagttaaggaatgatgtgatttatattaaaagagatttctccctcaactgtagccaatccactttaaaaggttaactactagcattagctctcattaaccacacaattgcatttataattaaggtaacagcaactcttccacaaaaatggaaaatgtctagaattgtggataaatattgcagtgcatggaagccaataatcatggcttgagaatttatcaccttcagttacaaaaagtgcagtaaacagaaacatttgctctacatttataaattgctcaaaaatctttgctaaagatcttacaaattcagtaatattacagaacaattctaatcaatatttaataaggttaactacatccttagttagatatttgataaactttgcttttcaataatgccagtagatcttgggagaatgggtagaaaggcttaattaagctacttattaaataactttgaaaatgaaggtccttcactcagttcatggaactggttgaggtcatactgaaacagaacatcccatgtcgaatttgctttatggcccatgttatggcagaggacgtctccatccttctcatgactcaggtaggaggggaaaggtttattctgccatcaagccatctaggatattttatgtaaatgcccattatctataataggagctaagaatacaactgtgttaggtgccagtaatacaattccttaataagaaaaaaaagtatattactccattaaacaagtttctttaggatcttgaaggcctggcaaattatttttcagcttaggagatatgctgtaaagccaagtagcaaacataaagtaaatgctaataagtttccatatagccatatttataaacaaattcaccctatagatgtcaaatatccatactaaggaagtaattttatcctaattaaatacactctagaataatttatataatgatattatgtatttaaagagaaaagcatgtcccaaatccagcactctgatacagctgccagttgggcataggtagatatatatatatatgtatatatatacaaatatatagttatactcagtgaaattaacaagacccaaaggtggtattgtctaggaataaaagggataatttttgttgttcacaaaagtaacttgtctagcaccacacatcagaaaaacacaaaaatagcacactctagttctaaacagctatgtctaaaatagattatatagtaaaaccggtattatacagcatattgtggatttgataaacagataaatatttgcactgagtaggctgtttataatataacattttcttatctatacagaatgaaagccaaaaagttaactgtatagagatgtgcagaacaacattaaatattatgactcaaaagcagggacaggtaaatttgaaagaagagtaagagagaaaatgtttacaggccgttacaagttcttaagttaatagtaaataaggaatcgattgctcaagttgaagaaagcagtaaacaagagattgcatttacatgcagatgtctaaaatttgtattttttaagtctatgcacaaaagtcatttgttttattgcttgacattcagttatggctagattatttaacctattttttttgtactttggaaacaagaatattgttaaaggtgccataaaaatggacaacactgaaaacagtttgcaaataaaccacctaacactgcagttctttatacatattaaaagccttgtctggggtttgtcatatgttaaatattatttaaagtgggaaaatatgttgtagcttgaagcctcccattggcccaaacatccaatacaaaaacacatctccacaaaaggagcaggcagacaatacaggtacatttatagaagcagccagctaatgtcctaatgtttaaaaatttaccactgtttaatatgagatttcaaactgtgtggataacaggagaattttggattcaggaagatgtatacagtacatatggattttttttgtgaaatcattttcactatattgctcaagaattatctgcatttacatatgcaatctgttcagtgataatcaagttcctagaaatagtattcatccacattaaagtaataatgatgaaaaaggaatcacacatgaacactggagagaatttagttgttcttagagaacaacataatggcatgtgcaacatgtcaaagctaatagcaagctatctttcattagttcttagaaggatgaaagtaaaagaagtgtggtactgctaatgtggcaaagtacattaaatgtaaacagcaaacacagatttcctaggcatctatttaaaatattcatattcactttctcaatataagactccatgttatgttgcatcactgacaaaaggttgtttctatttggattgaatattctgtcattcatttataaataaatgactgaatgtatttattgctctaagttctgagggtttggttgaacatggagatcccccccgcccatctaggatggctacttggtgtgaagtcaggcttctggattcttttaaaaattattctgagagcctgacaacactgatctcacctacacaaacagacagacagacccagaagtgaaaccaattgcactgtggagacattgctagtcagtcttctcatctcttaaaaataaatagcaataggaaggtctctataatacaatctgatggaacctctttactaacattatgtttagggatagaatgaagacctgtatcatagactcttaccaatagatcaagatttactgttgcaattgcgtttctgggcacattatttgatctataatataaagttgttttcatggggttctatatcataactttataagaagtggcaatcacatgttatgtaaaaatgtcaacgtgtgtgtgtatacacacatatacaaatacacatagagaggagagatttctaccattttccatattctttattatcaaaaacaacatggtaaaggtatccttttcatcttacagacatgggaagttttcccagattatgttcctctatcatagtaagaaaatatataaatcttcttgtgaatgtgtatcccaaggtggaagaatcagagccaacaattacattgaacttctctgactttatggaaagtaatatgtggaatatgataacaaaacggtatttcaaaaatataacatgtaacactaaatgttggctcgagttgctgctgtcatacaggcaggttttgttttgtctttaaacattagctcttgtaatgcatcagatataaactacacatgtagaagtaagaattgttttccatgaaggaatttttggtttgcttctagaggagaacccatgaaaacaatagttaattgctggtattttaaaaacatatttcatcttttacctatatcactgtactgataggcaggtctctcctcttattactggattttaaaattttcatccttaatatgtagaatttgaaatagtttttaacatatgatgctatatatatatttatcatgaatattttaattattagagaaatggtaactggaatatgcaaggactatactttgaatgatgctctttgctggtacattattaatttatcttttgaacacactggcataactttgctttggaagttattcagtgttttgaaacacaagactgacgagcacatcaagttctaaactcaacaaaatgagacgagagtaaagagtttacacacacgcagttctatatagttcacttgtgccttggagggatagtattattatcattattattaataataaaaaacacaatttgtcccagtagtactggccaccctgttttaagagttttaggagatccctgagcacattgtttctgactcttaaccccaactccaaaatgatagggcttctatcgttgataccaagatggattgtcattcacagtaagtcaattataaggtgcttatttacccttgtttttcaccagtcagcacaaagaactgtcagaaaataactttttattattatcttaaaataatagcattggaaggacatatgatttaaacaatcaatgttggaaacagtggctttaggattattatctggctgcccctcaacaataacaagtgattcgatcgacattccttagccaaaaacaaaaggcaaaacaaaaaaaaccaaaaaacaaaaaaaccccaaaaaactgtacaaatatgtatttttccctgagggatcaaggtacacccgcaagtgctctatgtacatattgcactagagaggaatgaagaacatgtgcaaaaaagcaacaatgagagaagcttacatactacttaaaccttttcatgaaagatactactaggttgttttgcattttggaatgtcggaacacaacaactagctattccttagtctaaaactaaaaacacacatttctactatggcacattcaatgaaataaaaagttttccaaagacagatagacaaattccatcaagaaaataatacaaagtttgtttgtttgtatttttttttttagaaaattacattactttctttctttgtttcacattacaaaatctttttttctttacacaaatcacattttattgcaggaatatttcaagtgccatcaaatatttatagaagggttaaaaaaatagaagtctctctaaagtggtccagacaaggctttgtatagaataaatctttttttccccatcttctagttttgatttaagtattttgaatacattttcttttccattgacacttagtagcctagaagcggtccgacgcacacacatcatacacatgcaaatcacacacacacacacacacacacacacacacacacacactccttcctcacctgaccctcagcccacccccatacgctcacagataactgggtatccacactataaagaacaaccaaacttagaagcagtgtcttaagtcatgtttttcttaagttagaaagggtgaattaggatgctgaagactttaaaaaaaaatccatagctttaatacacgttaagatgctgaacactttaaaaaaaatccgtagctttaacacaatttgcaaactgtccaaaaagcactttcatctgtacttttgtttgcattgtgaccaaggccaggtttttcacaatataataaccatttggacaccattggaacagaaggtattcaggctttgtacaaaagccttatttgccttatgtaaaaaaattgtacaaaggcattgtagcagcggggctgacagtgatgtggttccaatccttaaaagactattggagactgaagtttaggaaactttaattataaaaactattaaggataattgttctgatatcacccaagtattttatgtcatcacataggtgtttttgtaataatgaagaaaggaaaatgcaaagtttttcacatccttttctgagctccatattttttttaaactgaatttattgtttaacatcagatcccaacttagatccaaatagtagtcagttgtttccttgtttcatggagcatgtctctgtctacaattccatcctattatgtcaatcagtggacttggctcttaagctccaccgctgcttttctttcagaaacacctgggaagaagcatcatattacctatcttggtttaccgtaaaagcaatgtcaccatggcatgactattactgtggttagagcatgattgtttgtaggtacatgcagaatcccttctgggaaaaggaatttctttttaagttcatcattatgttctctctcacccttagagaaattcaattagcttttattatttcacaaatcgacactggaattaggtttagttgctctttaatgcgctagcacctgaggctggtcatattcagaaagctttggttaaaaagaagttaatatactttaataaaaccatccccaaatttagtgaatctgaatgacaaaaaaacaaaacaaaaccaaaaccaaaaaactaaaacacaaaactcaaacaaaaacaaaacaccatttccccccagaggagaaacaatagaaaaaaaatggatgaataaataactgaactaagcttggtactcttttcagagtataaatactactgatctttaaaggaactatgcttacttaaattaaagatttgatttaacccttcttgccccaatataaatactatatgctgacagttagcatctctctataaacacataaaattttacatgcctgtaagaaatttaaaggaatattactcttctatttatggttaaactcttactatgtttttggaaaaaaagttggatgttatttaggcttcatacacacatctgtgtgaataataccttccccttttccaagtccctcaagaaacaagtcagaaaagtcagtggagttagaaacagagtgaagtgctctgggaagcccatgctggtaacctagcatgacgtgaagagctgcaattcctgtagaagattccgcagggaccccaatggcagaggagactatttctcagacataaagggctgcatggaaactcctaccttaacacccatcggagatgttcccttttctgtacaaaatggtctttgaccagtagtttgaatcccacccctagtgcgactaaaatcatcgtctaaatgcctacattcccaaaaggtcacttgtttttaaaatatgcacatctgtttatcagactattcctttccccttcccccactagggatcattaaaaaaaaaaaaaccatgaaattaaacaaaaacaactcagtatttctcacctgaacacacaagccaaataatcttctaaatatttaataaaataaattacagtccacagtttcctagtgaagataaatacaagagtaaatgtttgcagctagcatcaacttcactttaaaggcttaaagtatttaatatttaaataagagaaactggttcaacattgtatgcttccctcaccctcctatccatcgtttttcaaatatggagagcaacattcttgaattatagcatctattgacaacaaatctagaattagttcactctgagataaactcatagggttcctagattataccaagaacataaacattcacaaagtaaatacttcatgtcctcacatggggagtgtgcatttgctcaggatataatctttgggtccttcttataataaaagctagattccaataaatattctggttgttgatttgttctcaaagcataagaattccaagttgagaccgagtccatatttaactactgaattgtgtaaaatgagcttctcctccccctcgcctccatgaggtggcattttaaaaagctttaaaaaaaaaaaatgagcatgatggtatatgtccaccacgccaatcaatcattcaactttgtatgaagcataaacacatctatcattaaacttaccaaaaagcaaagtataatttagggagagttccgtttctaattccaaattcacatgttaaaaaaaaaatccaacgtggtgatttctagatatgaccagccagtctcttaaaaataattttgtaaacagcagcataaatacctcccaacgtaccttccaagccttctcagttaaacttgtgtttctggtgcacatgcgacacgacagtgaacacgctagcatttaatttaaagaaaaaggtgcaaaatgaaagtgccttatcaattcaacaggaaaagctacaccagtaactacattttatattacttaaaacaatatataaacaatatctcttttagctatatatagtcttcatgcccatttaccctgtaatatattataatgctattgttgctactgctatggacccttttcatgccatcctgcggactggcaataatcggtgaaaaaataaaaacttccttcatgaaacaaagagctagttgtgcaaagtaatgccgcaacctccgctatgcacaccagtcaccgattattgctggactctctgttgttactgacagattggtgactctgtagaaagtctgtgggcagtgagctacaagaaaaggaaatcctccgactttagtaccctcctcctgttgtaaacagaggtcaatgatcaagaagtcaagacagaaaaagggtccatatctgtaggcataatggaaatcatatgcatgagaaaaacaagttcaacttttatttgttttcattgtttcccctcctttgcctgaccccgatcaccaaaagatgtgcagtgtgtggcgctccaggtctgtgcagggccatataaagtgtctcggttaatttttttgtttgtttttcatgtttgtacttcagacattctagaagtgcttaggtgataacatttacccatcaatttgcattgctggctcaaattctgaagtgaacaactccttgtataatggaggaaaatgaagtcgcacaatgtctgggtatattgctttaaatgccattagcttttctgtatgtcgtccacataaggctcttaaggtagacaccttgcatattaactgtaagtgaaagaaaggacacaccgtcaggcaagaacaggcataagcatcaaagatcagggaacctgaatgatctttatgacattgtttataatggtgaaacacacttaaagcaacttaaacatccagtagcagaggattggtaaaaataaatgatggctgggcgcggtggctcatgcctgtaattctagcactttgggaggccgaggcggttggattgcctgagctcaggagttcaagaccagcctgggaaacacggtgaaaccctgtctctacctaaaaaaaaaaaattagctaggcatggcagcgtgcgcctgtaatcccagctactcgggaggctgaggcaggagaattgctagaacccgggaggtggaagtttcagtgagccgtgatcgtgccactgcactccagcttgggtgacagagcaagactctgtctcttaaaaaaaataaataaataaatgatgatatagtcatgtcatagaatgccaagtatacattaaatatgattttcaagatgaataattcaataactagaaaagatgttcataagcaaaagttggcacagcttgtcagcagcagactcatacagaacccaaggctcttgacttcttctactccaagatgccttctgctctacttcctggaatcctgccttctaccactgtgcaaaaagatgtctagtgatggagaagcgggtgaggggcagtggtgggtgggtagtgaaggcactgcaactggaagtgatggcatcctctacacattttatccagaactggcactagtcaactccgataactacacgtttcttttcgataaggagttttgcctgtaataaagcaatgctgggtctgagcaaaataatagagtcagaaggcctggatggaggccctagcattgaccatttaccagctgagggtaatgacacaatttgcaaaattacttttagattccaaagcacctcacaaaggcaaactgcttattattttaacccagaataaccttctctaggaaatgttttcaccagatcttgtccacatgttaagtgctgtttataatcagagatcctaatggtactcttgcatttgggcaaagagatggagagtgaagctcctgacagggctcctcccttccacttcccattcctgcccgtttgctcatttaacaggtgcaaaatcaaaaagcaaaacagcaattaacccccagttacccctttctggtctaacatagctataaaggagaaaaaaaaaaaaaacaagcaaacaaataaacaagaaaacaaaaccaaaaacttctcacatcatctcacacaataaaatacataaaataagaaagaacagggctgattgttctaagaccaaatacatactactagcaatggcactgaaggatattagcacatttaaaaaattgacattataatcatatttattgtgaaagataatgattggtaaaaatgaaaccttatgctttgaatacagagtagtgatgggaaattgacaaaaatgcaaaagtcatttactgttgatgactagtgaatttaatggaagtagaactaatattagtatatatggtcatcctgattaagtcttttagtcctttataacttcttcctaaattcaaagattataggctgggcacagtggctcactcctataatctcagctctatgggaggtggaggagggaggattgcttgaggccaggagttcgagaccagcctgggcaacatagcaagatacccatctctacaaaaaataattaataaattagccaagtgtggtagcacatatacctgtagtcttagctactcaggaggctgagacaggaggatcttttgagcccagaagttcagggttgcatagagctatgattgtgccacttcactccagcctgggagacggagtgagaccctgtctctaaaaaattaataaattcaaagattatttttacagtttatgtcagtgcagaatattaactctgctttatgcctaactttgatggaagagaatttctagaatgtaactttttttcctacattgccttattgctgcaggacactttgtaatcaacgatagtaagtataatttagactgaataatgagctgtggctcaacagaatttttttgaaatggaaatttatttctttttagtagcctgttgccttctgatacttttgggaattggtcatatgacttacatgaccatattggcagcatgatttgtgccaggggatagttcaggccatgccaactagaagcctttggcactcacctttgttagtattccatcttctcggtgattcttctgtaggacgtgttgaagagctagctgaattttctgttgcagtttttcaatttttaccttttcttgcagccatgagcgatctaagcataaaaaaatgatattctttagcattcctctgacatggtgtcaggatccttcttctccggattcttttgatacggataattatatcacaatgaatatttagagactcagaggccagtttcactcctctttcaaaatttctcctaatggagtgaaaagtgatccaaggaagttataaaacagggtgttaaacctttccatttttaccaatacttaaaggaaggatcctccccttccaaaggataaacaattaaatatgaggccatactcatatgagtgcaaatgaaaccatcatggcccctcgagacgttctaataattatactttggaatgaaatattcattatcgatcctgctagcttttttgaaaaataggaaagttttcttgtaatctttgtcaactaaaattgtcaatagaattccaactgacttaagggttgttaatttaggataaagtctttatgtctaagtcttccaaatagaaggtagtaacttagcaaaagtgattatccccaaacatgcactactggttgaaaacacagattaaattcagataatctagtggatgacatctaaatggattttaacaaaaaaataggatgtcttaaaaatcttgttatcctggagactggtgttaagacaggcaaccctattccaccacagcatttctcttggtatcaggaggttaattctggactggattttgttcaattctcatttctttacattttgtctgaaaggcatgaggttttctcaaaagaatatatgtttgtgttggatgggtggaaaagagagggtgttatttgaagacttaaaatccaatttaataagggtggagacctctcttagtagctcccaaatattttatagctattaaacgtatgggccttgtaaaaattctttatcttagacaattcgaaaaccatttttatttttatttggttgtcttacctgctgacatcagtacaaatgcagaaaataatgcaatttcatcttcagtcaggtgcatagaacataaactctttccaaattcaaacacaaagctaataaagtcttcacaacctgccaaaatgaaaacaaagacagtttagaattttgattattgtcttaggagaaaaacctaggtcttaggttttcctaaggttctcctaagtccaatagaaggtcttaggagaaaaacatggggaaggtgaagagagatctagtggttgaagatcagaaggaatagtagtaacatttctacagtataatagtttaaaatcttaaaagaaaaatctgtttagtcatcaccaccacttccatcacatcaccattgccactgtcatcctcattgaaaataatgagattgaacttttgttgtgtgactactgtggcaagtattgctctaaggtatttctttgggtttcttcttattttaaaacagctctatgaaggagggattattattatcccaattttagaggtaaggaaactgagacttggagaggaaagtaatgcacctaaggtcacacaggtagaaagtacagcctaagaagaagcaaagctaggctgactgatttcagagcctacacttttaacctatagagtctaatagccatattctaactgatatgttaaattaactcatttttgttttcaactctatttcatctgaaacatccttaaaaatgttaacaaatgacatattctggtggtaaaactattataactatttaccaacctgaaaacacagaatgtgaaagtcccctagaataataatccgttttccaaaagactggttaagtttggtgtctattccttcagatttgcatattttacatataaatgtatatatttaaatgacaatgtgctacatgacagttcattatatatatcatctgtcatataacttttaaaaaaatcactcattttagatacttatccattcttcttaataactatgttcattttatttaaattatagaaatccaaaatttattattaattattctgagacagagtctcaatctgtcacccaggctggggtgcagtggcatgatctcagctcagttaaacctccacctcccggtttcaagtgattctcctgcctcagcctcctgagtagctgggactacaggcgtgtgccaccatgcccagctaatttttgtatttttagtagagatgggctttgccatgttggccagactggtctcaaactcctgacctcaggtgatccgcctgccttggcctcccaaagtgctgctattacaggcatgagtcaccgcacctggccccaaattatttattataaattatatatcatggtttcacttaactgtaacttttatttctttgatatctgcatttcagtctcattaatggttactgtttgagggggatggaagggcaaagcttttgccctttgcttaattttatgtatcagctcacatcctaaaggtcatccgaataatatatcaccagcaaatctggtttcttaaaatctggaagggaactggaaggacacgtcatataaatccctttgattaccaactagataaaatgaaactctacatctttacaagtaatgtagacaaaaaacttttgagctatatgacttttctacagtgactaactagaaagtaaaataggtataaaaccccttaatttttgtttctaaataaagttttcattttgtccaagcagagctttcactcaacccgcatcttttcctatagccctgatttgaagaaaaggcaccttgatatccccttacctaaggatttgaagacgtcggggctggcatacttcccatcaaagtacacggtgttgttctgagagtcaaaggcacggcacattctgataaacaccacctctagagaacctaagcagaggcagaaatggtttgggtcatttgggtcatctgatgttagtgagtttgtttctaagctgctcatgtagagactccttctgcaacagcatggtgggtgtcgtgtgcagtttagctagcgggttctcagtcacatcagctgtctatccaaaagggcagagttttctatgtaattaaaagactgttgtgctgaagctaagccctgtttaactgaagtgagggttgatttataaattacttccttagcactcttctacctcgcaatgcagagtctcagagttgctaggaaagcatttattcatatgtactaaaaccaagaatcaaaaacaagtatatctttctgagttctactttcttcttcctaacatcataaactcggaggacttggagtgtagaaacaaaacacacgtgatgggaaaatttgggaatgtaggtgaccttcaaattaatcttttcacccagaagagaagaaaagtggggggaatgtttcctgaatatatcttaaaacctttgaaaagaactccatttctgctaagaaaaacctgagctattatcattggagaaaaactgttcccgacaccttccttaccaagcatttctttaataagcgggtgaaagcaggttaggaagagatctcaaaattcacttgcaaagcacatacctgcttttagaagcacaatttgatcattttgacacagttccataaatccatcaatgcgtttggcaaactccaccacatactgtatagcttctgtaattttgatggcacacaattgccacatcacctcccgctgctgttaaagagggaaacacattaacatcctccaggaagatgttagcttttgtagcagaagctgcagagttatgaaagcaaagcatgccactgctttagccctgggccacgaagagtggcaaagtgggatcttattttattttattttatttttgagatggagtctcgctctgtcacccaggctggagtgcagtggaacaatctcagctcactgcaacctctgcctcctgggttcaagtgattgtcctgcctcagcctcctgagtagctgggattagaggcacctgccaccacacccagctaatttctgtatgtttaatagagacagagtttcaccatgttggccaggctggtcttgaactccggacctcaagtgttgtctgcctgggcctcccaaagtgctgggattacagggatgagccaccgtgcccggtctggatcttcttttaagtaattattttgccttgggaaatttaacaccactttactttgggggaagggagaaaaggagaatcaactgaatttattgtgcacctactatgagctaggcgctttatgacatccttgttttaattcactttcataagaatattttttctggctgggcacggtggttcacgcctgtaaacccagcactttgggaggccgaggcagggggatcacttgaggtctggagttcaagaccagcctggctaacatggtgaaaccctgttcctaccaaaaatacaaaaattagccaggcgtggtggtacacaccggtactcccagctacttgggaagctgaggcagaagaattacttgaacccgggaggcggaggttgcagtgagccgagattgcgccagtgcaagtgtcagcttggcgacagagtgagactgtctcaaaacaaaacaaaacaaaaaactggtggatatgggagccaggattcaaatccaagcatctctgactctaaaatcctatttcatatactttgttgcttcttactgttttcttgcttctcctttgtagctttggctgctggcattacctgctacctcaaaggcaaacaaagcaatgtgttgctattccccaacatgtcctgttaaattccttttatattcgcactctccatttcagttacagaatggtctggatctttttcgttgctaacttgtttccccaatcttagtttcagactgttcccaccgatatgatggggtggaagaaacactgaattaggagccaggagtcaaggtctggtcttgatgtttcactctccagacatgccagtggatgttagttttcctcaaatgtaaaatggattcacttagataatcttgttgatctgggtgttttacagaaaaaggcaagtagggtactatttgtcagcctcatattgctaggttcagactggagttatgatcacagcttctaaattttttttgtatatactccctaatacaacttccagaaacatgaggcttccttgtcaacttccagaaacattaggctgagattattttacataaacttccagaccttaaaatcttgattgtgatattgagacaattctcaattcatttagacttttggaagctgcttaatctattctcctgttgacaaatggaaggaggtatgtgtatacctagaaagcacaatagaaattatttgctattgctgaaattttgcatctgagttaaatggcaaagcctcaagtacattagtagcttcagaaaaaagatatttaaacagaaacctgatgacattcattctttagtctgtgtgaactcttgaccaactttcctataccaacacccttcccaatattgcctcaatcctaggaggaaaaattcctcagatcataccttgttttgatagttctcaatttcttcctgtaaaaaggtctgccacgttatctgctggagctcttctctcaagtattggcaggtttccagatgcgatttagatatattctgtgcaaggtgttctaaggagaaaacgggagatcacaaacacgaaaagcgaagttctttgaataattggtgatttaatatttgctttaagaaataacaagtagaaaacaatgtgctgtgcgagttttgactgtctttacacatttaaacaagtaatttggaactgttttgtatttgggaacgtgaaggaggacagggactttgcaaagccagcatttgaagataagacctgctgacttcaaagaccctcctgactttgcccttgttctgtgcctttataccaatgtctaggaatgaaaaaatattgacctagatagacataggaaatgattgacgtggtgcttcttcttggcatttttatgaagacacatctgccacataacattgacctgggaaggattattcttattcttgaaaaactagaaaatgatattcttttatggtgacaactaggtatttcttttgtttttcctgcaaattgcagaacaagcattactgagggcctaccatgtggctatgcatagtgtagttgtgaagccacatactctggagctagaccatttgagtctgtatctcagctctgctgcttactagctgtgtgatctcgggtatgttatttaacctctttgtgcttggtttcctcatttgtaaaatgagggaaatggtacctatttcacagggctgccatgagaattaaaagagttgagcccttagaatggggaggattacttagaatgtgctacagaatattagttattattatacttgagcataaggagtttgaagatatgaaagacctagaggccaaagaagttttctctaggagcttgtaatctggtgaacacgtatgaacacactggaaggacaattcaagtctagataataaggtataaagttgaattacagaagaagagaaagaaaaaagtaattgaagctgtcagaaaaggaagagattggctgggtgtggtggctcacgcctgtaatcccagcactttgggaggctgagctgggcagaccacttgaggtcaggagttcaagaccagcctggccaacatggtgaaaccctgtctctattaaaaatacaaaaaaaaattggcgtggtgttggctgtctgtgatcccagctacttgagaggctgaggcaggtggatcacctgaggtcaagagttcgagaccagcctggccaacatcatgaaaccctgtctctactgaaaatacaaaaattagctgggcgtggtggcgggtgcttgtaatcccagctacttgggaggctgaagcaggagaatcgcttgaacctgaaagctggaggttgcagtgagccgagatcacaccactgcactccagcctgggcaatagagcgagactccctcttaaaaaaaaaaaaagaaaattatatctggggaaatggaacaagcagttttgtgcttggtgtattggagcacagagaagctcaggcaggaggaccacatagaaggctgctagaatctagatgccaggaactaacaatttggagcagcttggtaataattgttctggaagggaaggatgattaaagaagtattttttaaaagaattgacaaaatcccatgaatataaaaccatatcaaaaaatgatccctctccctagggttttgagtatagaataggcaagtcattttaaaagaacggtgctgaatgcaaacttggcaacactagggagaatatctttttgtttggaaatttgttactgcttttgtcaaacagaagcagacttgtttgtgtgaaaacagagcaggttcacctaaatggagctggaaaccagaatctccttagagacactgaaacataataaacctgaatggccctacttggcaacacatagacactaaaacagcatgaataaataacataaaaaataaaacacaaataaaagaacaaatgtaaaggaaagaatgagaaactgagagtgagagagagaagccagtaaattacatgtcttagaatcaatgacgctggagaataggtgagtaaagacaaaaataatggggagtaagaaacaagaaaatacataaataaggtagtgaactacctcttttggaaagaactctcactatataaggtcgtttctagaatgtaaaccaatttttgccgataaaaaaatgatgaagatgaagagtcttcgcagggaagtagggggggatgctgtggagtgaaggatgagaagaggctcatatcatttccttccaggttatgtttcatttctagttaataagatacttagcatcttgtggtttcactttgtcttaagaaactgtggccacttatccctacctatttaaaacagccaataaaaagtgagacaacaaatcatgcagtgtacctgacataccagtagagggcagtggttgcattcacaccatctgctcaccaacagcctttcattccaattcatagtcgatttggcaagtgtaagattttagacactttgctatttttaaatctccatttcagcaaaggcgagtatggtcaggctgaataaaattcgagaatttaagcgtggtctctcagataaagtctggaatagtgaaataccttgggctaggagttaggagacctggcttctgtctgagctcagcagataatctatagtctacctcactttgtgactggggcaagtcatgtgccccaaccatgactgcttcagcaatacagccagcgcctcgatacttcagatgggaagtcctcgcttctgagttagtcacagattttcatagtgggaaggaactttagatagcatctggtccaaactgtccttgtttaacaaataataatgacattaataattatgatagcagttaacacatatagcattcactatatgccagtcccacataatttgtgtctatcctgaatatgtatgttttctcacttaatccttataacaaccccaagagaaaggtactagtattatctccattttacagaggaggaaactgaaccacagtgaagtgacttcttcaaggtgtcacagctggcaagtagcagagctatgattcagacacagacctttatattctaggagtagagaaactacagctcgcagatgttacgtggtgtatactgggttgtataacttatattaatgccaggaccacaacccatataagcggatttcttgtctcatgctttgcccagtatatcagctgtttctcctgcgcaaagctttagatatcaattatagtaacaaacctaatttgcacttaaaacctaggtcgtttatctggaatgtctaattcaggtactaattgtacaccaagggcaaaatttcctagccaaggatgaagtcatatttttcactaaaagtaataggttgtgcatactacacttgaaagagagaattggacttaggatgtgttggtttataatttattttcctattatacaattggtttcacttgtttaaaatctgatgacaaagtttagcctaaaatgaagtcaagagtcttagttaaagagatagcaggctttaagccccaaaagaaataccagggaaatttaagtagctttggagaagcagcaacaagacttgggccactttcatgatactcttagctccctgaaacactttgcatgtataaatgggataagagaattagagcccaattatatactttccagataaatgctagtttagttttgggtttgggaattctcctagtgatgatctcatttaatttatcttggtaaataccacaacacctgtgaaaaatccctaatttaaaagcacatagagcaagcatgagggggcagggctcccagactgcactggaaagtgagaccatggaagaggaagctgacttgtccgggagcctcagggaatcggctcagccatttctggccccacttcggtatgagtgcattttttagccaaagtgccatgttcaagggcacgctttgcctaaggcctatggatttatttcaggattgaatatttgacaagcaaacaggacagagtcactagtatttatggtaaggtggaggcaaacctaaagtgagtcaggtcatttttcatggtatcatgtcagctttcaatcaaatccttattcatatctgaaaattgtactttcattacagttctgcttaaggctcagccaaccaagatttcatgacaaaaatggaaggtttttgttctagttcaagaaaaaaaaaaaaaaatcaaacctacctctgctcagcttggcttctagttcagaggtttctctgttaatcaaaagagctgcaatacaccttttaatgctgttcagtggttaaagaccaggcttaaaatgtccctgctcttgaggatttaaatttagacccataaagagatgcttgtgtaaaaaccgtaaagaacattcaatttgttctatttggagaaagattttactggaaatataaattttcacttaaaagatgttttatggggtgcagaggtagagaaaccgtctaaagaacacagccattatttctgtgaactgaggatttctgtgctcaagtctgaacctgctgtttcttttccgtctgaagtcttcattctctccttgtattaacttagtcatctccacagcaactaattgacatatcccaaaggattataaccttgtgtgaggaaccaccaggaggagcagatcaaatttaaaaactacaaaggttcttatcaaagtttttctaataatagtgctgtacttaaaaatcgattaaatatagcagcggatgttaacacaacttcctcgaaatggaaagttgcccattgtctgtgttatcaacatttctaggtcacatctcccaagaagcagtaatgttccagcaataagaaaaggacagttttttgtcttttgcatggtgagccttatatgaattacatcaattttgtcaccaatatccatcatcagaacattttggtaagtaaagaagctgatttctgttgaacatttatactatatatcagagttgcaaaaatgagatgcctacaggggctgtgcatatgatataaatggcgggagtcaggtgggcccattgaaaggtgtaatcccctggctgttgccagttggctgttgacattcacaaatgttggctcagtgtaaatagatcattttttcccctcccacaagaagctaaaaaagctgaacttttgggtataattatccaaatttaaatattagcaactgattcaaaaattttaaaactctgccctgggcaaaaaaatatgtctgtgggccaagttcagtttgtggactgccatttttttttttgtcaccttaggtataaagcaatccttggaatataactaaagtaaaccactaatgaagttaatgtagccatttcctgaacttacagttttctgcagaattcaaagactgcttccgttggttttgccccatttctaatgctgagaggtcaatgcatgtattggataaaccatgggaaacagcagagggtcaaaagcaagggggcagggcagaaaattaagtggcccaaatggtaaaggtgaattgcatcatttagcagaactcattagaggaaagtcagacataccccttttacttcaaagggcatgaatagagcatcccaggagaagcatgcatgccattacctaattctgccatggacacagttggggaagtctcgccgttggtgaacgaacagtagggaaagaagcctgatgctggtgtgtagtcacatattggttctggtttgattccattgatatcaagacctgactggtctggggaaggctgtatgtccaggtagaagctgctgacggcggagtctgccttactcccctcaggggtgtgcccgtcaatgtagttactgaggtcgtcgtgaagttccgtcagcccgttggccgagatgttgtaggtgggcgtcagcggctcagcctctccaggctgctgctggtggtcgcgctgctgctgctgcatccggtgtttctgtacttctgcatacaagctgtctctctgcttttttgacattcggccaaattttacagctggaagaaaaaagccaaaccatactacatacaatgcgcttttcttcaatattctctcctgcgagctttggggtttcctttgaagtctcacacaatctcaatccaaaactgcatgaccacaaaataaggacatattcagaggtgaaaacagttccaacccacacagactcgctccagctccccaacagcaaacacacatcccagagaaactcatgtttcagaaagaggcctggtgcaggtaggaggggcccagagagatgccacttctgtttccctgctgtcacatcccccgtttccactgcgccccactgataacttaatgggcttgttcactctccccccgtgcagctggcttaggctacctctttctctcccacgttcagaccaaggcacagggaagcaaagactcacagggttcatcaaggaataagcagtcaaacctcagcgttcattcagttcaccgtcttgtacgctccgacagttctccctgatcaaatggccacttctgcagcttcattgtgaggtctgaatgaactggatgaggcctctgtaattctttgaattacatcagagtacctgacctaagaagccccctcctccagtcatgggtcatgggtcatggcagcccctgtggaaccctgagacccatctttatttttatttatttagttagttattttgagacagagtcttgctctctgtcacccaggctgaagtgcagtgatgtgaacatggctcactgcagcctcaacctcctaaggtttgagcgatcctcccgccttggcctcctacgtagctgggaccacgtgtgtacaccaccacacccagctaattttttcactttatgtagagatggagtttcgctatgttgccctggcttgaggtctggaactccagggctcaagcaatcctccagcctcatcctcccaaagtgctgggattacaagtgtgagctaccactcccagtaggacccatctttaaacactttctgctgttcccatttagcctcaagtaatcacagcatcaggatttggaaaggacaaatatggtattataatataagatccttataatgtatgatccttgttgggcagatttctgtttgtaatgcttctctttgggatgtgtccccatatttaaagtggagcagtcactataatgaataactttccaattcattcagaatatcaaatgaattcttgtgaaacaccaagataactgaaaacaaaaacacacaaacaaaaaaccctatgatttcctggtctgaattcttccatgaactcacttatttttcagctagactcagtctttgctggagggacttagttctcctaattgattgtggttaaatttatagctgatggggtggatgcattcacccatttgactatgatcgtagttataagagtctagggcaggaggcaggatagatggacacgaagttgggaaccaaggccctcacagtggccaggtggtgaattcttttcttgccaaagaggacgcgctgtccttgttcacagaggaaacaggtgagctggaatactggtcactttccagtttccacaactcagataagaaacttgggtggggctgctcaggcagcaaccaggctgatgtgggatctgaatttcagaaccataatttcttaacctccagaattctttctatgcctacaacaacttgtgctatttcttatatgcaaaattttcagaaggcatactgaaggtgcttaatttttttgaaaaaaattttctaggacactcaaggggcctaatacccacaggtgaaactttctgctgtgactccgcaattatgatttaacttttgtattaatattaacgacagtaattatatcctgtaagtgaaataaagggaccagctcttgagaaaatgcacacacaacttgtgatttaaacttacaaattgatgagatatacctaactttgtcagtttagtaccatcggaagatgaaatctgcagagttgcatgtcacaggaatttctgagaatatggtggaagttctgtgatttgtatcttccaatgtcaaaagcttcacttttgtagtggtgcacagagtgcctcttagaatacgcaggaacaaaagtgaactcgtgcctatgtagatctacaggcgctaagaacatcagattatggggaaggcagactgttggaaagcctgctccgcattctgaagtatttttccacaggctgaaattccactggaggagacattttccttcaaagggatctcttaagagagccagctggtatatttggaaaaatccttaaaatggacccgctgtgctttctgcccagtttccacgtataagcataactgtcttgaaatctggtgttgattattcagtgcacttaagatagttttccaggaagatcttgaaatgttttgtacttgaatggtagacggtctctattccttaaagtagcttcatttaatgaaaagaacacttgtcattgagccatgctttgcactattttcacacattctgtatgtacaaatatttggctttggcatgtgattcaaaatatccagttagcataaaagcggcttcatcccaacctccaatagacttactagtgtaaagcaagtaacagttgtggttcacatttcctgcaggggaaaatgcctagaggagacatctttattaaggccttcagatgacacttaccgtcagtcaatcgacccacctataatggctgaaatatcaaaaatctgaaggtgttctgagcacaagacacttctcctccacaccacccccacccatcagccagccagctgactctgaggatgaggaggaggaggaagcagctgctgtgagttccatgtagctgccagaggagcatggggggcggggcgtaaggtggaataatgaggagggggcaggcggggcagatattggcagatctgagtccaggtttcagaaggcactttcacaaccccgtgcaactgtacaactcaagctgtgagagctcaccatctcgagacatccctacggcaaggcatttctgtaatcgacagtgttggcagcggtttctactggttcgatcaatcaaacagttcttctgacgaggacaggagtaggtggcattgctttgctgacttctcctgaaaaagccctgtgatatggttataaaatataaaacaggttagtgtcagaatgagtggtatgatactaaaggcaggatgctaagcactgagtggcattaatatttaatggagaattaaacttgtagcagaatcatccaggagaccattaatgaaattaaagtcacttctttttccttgagtaaaattgatccccagagcctaatcctccatcccttatacctgcaaaactttctttaacttcaacagacagttgcccatgtaaaaaggcacaggaccaggtccttgttcttggcttctgatgatcaaaagcaatgtgcctgatggaatgatacaaaaggacttacctttagcctttatctctaagagattgtttgtaaaataaatacaaaacacttccctggaatatccaagttaaggaaaatgcagccacaccacaacctagggcactgtgaacctggtgaaccatggtaatcttcactagcccacttcaacacacggccctttaggcgtttctcactccccaagtctgaatctgctatcgcaagcattagataacacttggagggattattttggcagatcagattgggaatattccctcatccctggcagtttagaaataccacatgttcagaaccatggcctttaaagatggaacaaatccagtccaatgctcatcaagttcctctcgtgtcaagtgctgtttgggaaatgagaggggatacaaagatgtataaggagctactgacctcaataactttatttttgtttgtttttgctaacttcctgagctgtattcttagctgattttcactgtttattcttagagtgtcaagttttccttttagtgatgttttaacagcaacccaaaagctttactacgtagtattttcattctcattcagtgaaaaacatgttctaactttcaatagatttcttcttcaatccagatgtgatttagaggcatatttcttaatttccaaacacatgggggctttttttcgggggagggggcagggtcttgctctgtcacccaggccagactcctcggctcaagccatcctcctgcctcagcctcctgagtagctgggactgtaggtgcacaccaccatgcctggctaattatacatacatacatacatatatatatttatatatattgtatttatatatatatttatatatatatttatatatatttatatatttatatttatatatatttatatatttatatatatttatatatatttatatatatttatatatatttatatatttatatatatttatatatttatatatatttatatatatttatatatatttatttatatatatttatatatatttatatattatattatatatattatattaaatatatttatatatatttatatatatatatttatatatatatttatatatatatttatatatatatttatatatatatttatatatatatatttatatatatatttatatatatatatttatatatatatatttatatattttttttggtcgagatgggggtctcgctgtgttgtccaggcctgtcttgaactcctggccttaagtgattctcccaccttggagtcccaaagtgttgggattacaggcatgatccacctttttatctttttattgctcatttatctttcagtggctttgcaagctagggatgtatgcagaaaaaaaataaggtaagtagagtcatttccatgaagcaaagccatgaagggtacaaaagagaattattaccttcaaagctttagttgtgaagatagatgaccccaatgagggcgacactagtggggagaggtaaaatcctaaagaattaacagagtggtaggcaaactgataagggtgctctcccactgaacgatttttctggaggtcaatttggcagttgtatcaaaaatttttaaaaagcctacccactgagctaggcttttaaggaatacacgttaaagaaatatttagaatgctacaaagattttcctacaagggtgttcttcacagtactatctataatatagagaatgtagaaagatcctaactgtccaacattactgaattaaaagagtcatattgtatactcatacaatgggattcaaccactacaaatggtatttcagaaatataattattgatataaaaggtgataaaaatataccattgaatgtttaaaaaaggaactaaagagctaaacatagtataatccaagttttgtggaaaaaaaggacacccatatatttactataaaagaagatttggaaaattatgccccaaattgttggcagtagttggtggggccaatcagattttatttttctttttgttcatctgtgctttttttttttttcccccctacaataggcagatgggaagttatggtgggcagcttgagaagaagtgcacctgccttcctttgtaatggctgggggcctttgtcaaccaagttgatgtatatgacctcagtttccagttctttggaaaatccaacctgggatgggacagggcaggaccctgacttctcactcctcttgctttcagccaaggtgcttgctaaccttgacatgggcaaggctgggggcctcatgtctcagactgtctctctgttgtactttaactctacccttgatcaagtcccgcctcttctgtaaagcaatctctctcttctgaaaaatatctaaagctatgttttttattttattttattttattgtttgtgtgtgtctgtttcccctgtgaaaaggaagtaagaagaagtaaggctttctttgggggcttactagagagaattcaagaaaatataaatggtcacagaggcagataatccttagaaagagataccaagaggtcagctgtctaggtattcattttcccctgagacacataatctctgtccaagctgaaaggtgtttatctctttcttgagactctcccaccgttcatacccttgtgtaaaggcatcactgtggatgcttaaaatcaggaatgtatttgtttttgctttagctgaagttgagttttgtttgcttcacattaagcctgctacagtttcttgtgtgatcaccgaatatgaggaatgtctgaatgatctcttctttttttctttaagtggagctagtacttgagggctgccatgctatttcctagatatctcttctgacgaccaaatcccagcatctgtcacctttctttctaggctcttttccaccttgcatatttcttctcagaatcctttccaatttcttcactacttctttttttcttttttaaaactgaggcagggtttcgctatgttgcccaggctggtctcgaactcctgggctcaagcggtcctcccacctcggtcccccaagtagctgggattccaagtgcgagcccatgtatctggcattatttcttcatttctttcaaaagtctgaagtccctaactagacatagctcttgaataatggttgggtcattaatgaaaaggatgccactttttagtttgcatacatacattaagttaacttccacccaccattaataaagtccaagactgttaacatagaagcatatattaatcatcagttagctctgctttaagggcatgaggatgatgatgacagattatcagtcttactgagtacttgtagtaaccatatctttttattctgtattttggatgcagacatcttcgggctttgcagacactggagggactgcccttgcagggctggataactcctacatacagcaaacaacctgctgtcagccacctctcacacaaaaccaagtgggctagagcccacacccagcacaccttcttcatcaggcccttacgcttctcgccatgattcccctgccctggtcaccctagggctaggtacaagacaattagggacagcccctacctcctagcgccgtctgtaatgattcagactagctacttatcctaatcctgctcatcctgctgcaccttccttcctgtggaaaacaccatggaggctcttggcagtgtttccccacatccctctccccttcactgaccctggcgcttccccatgtgtcccctgtatggtgtggcatgggccctgtctctagggatttgtgagtccagcactccctccttaatcgtcgttttgctttcctcgtttcagttacttgcgtcaactgcagtaaaagaatattaagatattttgagagagagaagggaagcaaagagagaccacattcacataacttttattacagtatattttaataattgttctgtattattattattgttgttaatctctcattgtgcctaatttataagttcaactttatcacaggtctggatgtatgggagaaaacagtatctaaaaggttcgcagtttcaggcatccccatgaggctaaggggggactactgtgtaacaaacttcttccttcatgacagtcatttccagatctgtgtgtcttatggtacctgattaaaacaaatcccaaataccattaaaacagcactgacttcatactaggcactctatgctttatgtggattgtgtcattcacttgtgacaagggcaatattgggcaaatcctatcattcccctggttttaaggctgaaaaaacagaggcttagagaggtgtagtgacttgctcagagtcctcgctgtagcatggggtaaagccaggatatgacttcacatagtttaactccagaacttacactgtcatcttgttttgtttttctgcttctcttgtgtgtcaaaagaattcctccttagttgttctcatatggggcaaccattaaattaggcagtgtaaaaaacaagttatgcagaataaagtagcaagagcaatctactctgaaattagtgttttccctcactttagcacctttagctgacccagcttcctaccgcccagacattttacaaaaatctctctctggagttgcctcctgatctggattaggagtcacataagaaaatcagtctcatgagtccatcatttttcctcatttctgaccagaagtattctgccccatttgcttcaccttatttctaaatcactctagctcatttaaacaaacaaacaaacaaacaaacaaacaatgaaacttactgcaagggcacagaataactatcattaaagatgtctgtgtaattatgccataagttgcaaggcaaactcatgaagcattccgtatgttctttgagcagtggcactgtggctcgaaccaatgtccagcttccacactctctgcttggaagaggattacccttatttggaagtctcagttttgaggatttggggaaagcaggcacgcaagcagacacaccttattctctacagcatcatttatacctcaactaagtcagctgaacaaatgcctgctgaaaagttctgggagtggcatagctaagaaccagaaaggcgatctttcttttggattaagtcaacagagtcatacccacaaggagaactatcaaatatcagatgcgagaggtgaagtggggttataaggtgagagctgagaagggagaaacagggtgagtaaacctccatgactcagacgaatactgaactttgcatttcaggaagaatgagggtttgggttgcttctttttctttttaaaaacctcttcttttcagtattccttggggggcggggttctcagaggattaagggtttggaaaattaaacagataagatactaagagttaaataacacataagaggaagaaggattagaaagaggaagaagaaaagtagaaagtgtggtaggtaccttcctacctcaaggtagaagtagtgtgtttctaagtacagagatagattttgtctgattggggagaaatcctgcaaaaggattaggaagtgagtgagctgagagatgaattccagggattggaggtcatacagagagcaggggaagcacaaaactagggcatggagttttgggtggaactgaggaggcgtaaaaaaaaagtgctgaagttgtgagctgggaaaggtatcaagtacataatttggcaattttgttatttctaaaagataagctaacaaattacttggctgtcataaaagttcactttttatggatgttaaaatacatggagatgttcatttacaaacatggtgagcttgagccagagagccaccatgatacatttcaggtagtatacgtttagtgtgactgtggcgcactaccaccacctagtggcagcagattaccatgcagctattgcaaatagaaaattagaataaaacaaacaggcctttggtgctgaaagactttgagagattatcaggtacagcagttgacatataggtgatgcatcagaaacacccacagagcttttaaaagatacaccttagatatatcaaaccagaactatatatcaaaccagaaacttttggcgatgtcgtccaggcatacatagtagtttgaacaatgagaaattcccatttttataagtcaaaaaagaaaaaaattgtcatttttttttttttgagacggagtcttggtccgtcaccaggctggagtgcagtggcattacctcgggtcactgcaacctctgcctcctgggttcaagtgattctcctgcctcagcctcccgagtagctgggactacaggcgtgcaccaccacaccgagctaatttttgtatttttagtagagacagggtttcaccatgttggctagcatggtctagatctcttgaccccgtgattcgcctgcctcggcctcccaaagtgctcggatttacaggcgtgagccaccgtacctggccacaattgtcatttttatagtaaatattttttaaaagctccccgaagactttgacttccttttgttaagaaccagagattgattcgagttttctgatttgccaaaaacaaaaatgaagtttagaatgttaaatgacttgtccaaggtcccatggctgggactcaatctcttgtcctgattttaagtccagtgccctcttacttatatgtatcttcttcattgtgggacaaacaaaacaatgtcacacattctcgatttcctgacacagagtccctacatatccaccttttgtttcaattcctactgtctcaaagacatctctccagtgttcctcccttatttcacctagcttttcaaaacgccttgtgcttttatttctgatacgtgtcttaccttctctggaaattctattccctaatactttttctttaaaaaaaatgactgtatactatgaatttttcactgatcccattagatgggcgcttggcaaactgggacagaggccatggtgtttaggagaaggctcataccaggttgcaagagctgagtgctaaaatgtcaggaattttgttattaaggctagttattaaatctgttattacacattaactgatgcattcctgacataaaaaattaactactttttaatgattattttactgttatcaatgttcttcaggttgtctacatcaattatccttatatctgaaggtggaaatactataccatgctgtgcatcccttccctactctgtattctgtgaaagagcgggtcgggtggcttgaaaatggccattggtgggattatttacaccacagaaattggcaaatgttacagatcagggtttgatttattattttgctttattgtctagatttaaaaagtgatggcccaatgcagtggctcatgcctgtaatcccaatactttgagaggctgaggcaggaaggtgatggcccaatgcagtggctcatgcctgtaatcccaatactttgagaggctgaggcaggaggatcacttgaggccaggtgttcgagaccagcctgggcaacatagaccctgtctctacaggaaataaaacaattagccaggtgtagtggcatgtgcttgtagtcccagctacttgggaaggtgaggtgggaagattgttggagccaggagtttgagggtgcagtgagctatgattgtaccactgcattccagcctggacaacagagtgagaccctgtgtcttaaaaaaaaaaaaaaaaaaagaccaggtgtggtggctcacacctgtaatcccagcgctttgggaggccgaggtgggcagatcacgaggtcaggagttcgagaccagcctgaccaacatggtgaaaccctgtctctactaaaaacacaaaaattagccaagcttggtgacaggtgcctgtaatcctagctacccaggaggcggaggttgcagtgagccgagatcacaccactgcactccagcctgggcaacagggcgagactctgcctcaaaaaaaaaacacaaaaaaaaaaactgatgaaaattataataatgcagattaaacttaacagtacatcatatccagtgctcccattgtgaataacataaaaagtggaagaaatgttcttctggtatttgaaaactattaactgagtcagcaaggaagtggttcatgtcattgttggcgaatgaatgaagttccaaaatgtcttcgttgtttcactcccttcttagtcattaatgtaaacaaaatatcaaccaacattcatgttggaactagtctttcctcagttgtaaccatgcagatagatgtaggagttcagcaaaaatcatgagagcattcagtgagaatcatttgtctatatgaaatttaaaataaagaatattgtatattttattattgtttgaaaattatgtgaaattatatcaatgagatagataccaaagttatctacatacagatagacactttttgctttccagagagccagttgttcacagcttaccagcatgtggctggcctgagcctcatccttgctgtgtcaccagctctccatcacgttgtttcaatgcttccccctgactttggataggcattcacccaaagttgtggtttggccttctagagcccccattgactttctggaacagaatatatatatttagagatacggtctctgtcactcaggctggagtgcaatggagtgaccacggctcactgcagcttcaacttcctggactcaagtgatcctcccacttcagccttctcagcagctgggaccacaggtgtatgccatcatgcctggctaatttttaaattttttgtagaggagacagggtctcgctttgttgcccagactggtcttgaactcttggctttaagtgatccttctgcctaggcctcccacaatgccgggattacaggcatgagccactgcacccgacctagaagagaatgacccacagcctgtttcccagctgtcctctccagtgttttcttgctcagtgacaggcatcatctttccctcagttactcaaggcagaaagatgggcttcacttaatctctgcctcctccccacccatattcaagcatcaccaagttaggctgcttcttggcaccttcctatttctcagatccatctacttgtctccatctttactgcagttttcttaagtttccatgtctttcacttcttgagttggttattatacaaccttccaattgggacccctgcttccattctcattccctccaatccatttcacacagttactaaagatatctttctaaaacatcaaactgatcaagtcacttctctgctgatgagcccttaatggctccctgctgatgaccaggcaatgaccacatgtccgggcagctcttctcaaagtcatagaatgaccaagcgtaaacttctatctccacagttccccaaagaaactctctccttcccttcaggattcactgagaagacattcggttgctctgggaacctctctgacctgggccctctcaaagctggttgaggggcccctcccatgtgcacctttaagagtcctgtatttatccccctcctagcccttaccttgttgtattattaatgtctaccttttccagggcctgactgccttgtttctttgtttccagtagctaacccaatacttagagaagtcaataaatacttgttgaacaaccagaggaaaaaatggtggcagtgataaaaacagtggtgacgatatgctgagcacctgctccctactaggcaccatgttggacactttgccatcattatttgcaatccgcaacaacctacaattggcaaagtagggatatgtatatctgctttacaaatgagaaagttaaacttaagagaggttaagccgtgtgcccaaagtcacagagcaggtaaggggagggcccaggatttgaattcctgaatcctaggtgtatcttattccaaaggccatagacttcttaatacaccacctaaaaagcaccaagacaaacatgtagggccgactgaataacaacaacaacaacaaaagatgaacaaacaacaaaacaaacacgcaaaaaaacacttttcaatttctgtagtccgagttccctacaatggttcagatgagggagatggcattttatagggtatcaaataccaggtttccatacaggtaggaaagcactcatttgtcagataaattttaaaagcctggaaatatgcctggcacttcctactggagttttaatagttttgtctaagttcatgggctggctggacgctgcactgtgggtgtggctgggaaggtgaacgggggtctgattctgagttgtcccctcctgtgtggggctccttctcagtgaaacagaggctgaaatgctgatctgatgtttggtcttttgacaattttcacttaatgaattgattcctacagttcattaacatacccacttccacttctgtatacacatatgtcttaattagctgctcattggctgtttaattacaagaaaacagctgacagctgccttgctgaattctaatggcagacgctttggaacggctacacacttgcttttgacaaccaagatttattcataactctgcgatttattgtgaatgctcgtatgcctgcccaaattattgtattttccagtacaactaaaaatttggaatttgggggactgctgaagtgggtgtatgtctacctttcattttacgtctgagactaagaaaagtagagatgagaaaagcagagaatcttctatgtagaagcatgtactgtgttgcaattttatttatcttggcaactttctgttgagaatgttcagaagcatgggggtgagaaggaagaaatatctctggatcagtgtgggccaaaagttaattatctggctagagggggaaaaagaggataacttcattttattgaggggtaaacataaagggcatgcatggattaaaatcaagcagatgaaattataaaattaaagttgggtgggggtcagaaataagagtcctcaaagaagcatatgaggaaaaaaagttgttctttagaaagagcaggcggcctcattcacgaaagttagctggtccagccctatactcatacatctggcagcaataaatcacagaaattcagatttcctgagctacgtttttgttcagtagtgactggcctccctgtagaattgtatgcgcaagtggtctctgattaaagctgcccacgtgtcatatttggtaagtgtcgatatctgcttttgactgtgctttgccatactcagatccaatacaagtgaagacattcagcaatggttattcccaagcacgcacgagggacctgccccaagccaggtgctgtgtcagggccctatctacaacatggcttcgagccaggcgttttctgtgagctgaggaagggcagcagttactgggacatgattaagatctaaacaaacaaataaaaaaaaatctgaatcatcttgatgcaaattgggttttaacacagccctaccacttgcgcatttcatcacaggactggaagatttagctaaacaaaaattttcgcttactgcctgtgtataacagaaccgaaactcaggcatcgtaaggatgcaataacagcttgtcctcccccaggtggaattttcattttaaatgcccagctctaatactggggccacgtattaaaataaaaatgagcatgaatgtatcaatggtgaaaagtggacagaattagttcacgactagcaacatttcacaactgagataataatattagaatcctctaaaagataatttgagcctaaaaggaacattcatataaagctgctttttaacctaaacataaaaagctccagaaatggctttaactacttcagtgggggaaggtgtcacttatatactctagatatttttgaaaagccttttttattgtttaagaaaatatatttgttaacgcagagacattgtctcaaattatctttagtgggtagaagaggaagctttgaataagacatcatcttaaatgtattgattggtaagtgtatattggacaaatgaatgccagtttgttcttagtgttatcaagaggaaaaggttttaaatgtaatcagaaaccaattcactaaccccaatactggatcgtgcattatcattaaaaaacttgcagttaaaattgtgtagccaaaatatctaaaaggatatggattaaaaaatgtatgtgtgtcttgagatcaaatgttcaccctcatcatctgagcagccactgtatctcatgatgaaattaggaacagaagttgaatggcaaacaagatgatttctcaaaagcaaaccttaaccaatgattattttcctcctaacacttcatatttttattcactttgaagattgaactttaacatctacagcctctagtgttaccatggccttttcttgtgctggcatggggcacgacctgcccctccttcctggcaggcctgccccagctcacgttatgccccctcatcatgctcacccaaggctgaaactaaattcttttccaagagctcagaaatgtctgtatgaacagaactaaaaaccttgcaggcctggattctaacatatgttcttccgaaatgcaatattcaggctgaagcagtgccaatacattgttccctgattctttcaagagaacaagtaaaatacgtttataataaaaaccttggcataatggagtccttaaaaatttgaggatggtgtgcctgtctaccctcatcttccactagccacagaaagtgaccctttgcttcaatcaaactgagttatgtgctgtcccctaaatacaaccaagactgccctttttctgggcttttgcctctgccattccttgttctccttcttcctcagcacagaatgccctcccagccaccttgactgggaaaatccttcctcagctccagcccacggttggttcctcctcaatgaaaccttgctaggccaactctcctttagaccacctaggtatgctgtctagtggatatgtgcttcttttttctttttttttgagacaggggtcttgctctgttgccaggctggaatgcagtggcaccatcatagctcaccaggagccttgaactcctgggctcaagcaatcctcctgcttcagccttccgagtagttgggacttcaggcaaacaccaccatgcctagccagttttttttatttttaatttttttgtagagacagagtcttgctgtgttgctcaggctggtcttgaactcttgtgctcacatcttcctctcagctcagcctcccaaactgctggggctacaggtgtgagccactgtgcccagcctatatgtgcttcttatgtatatcatagattgtggccttactctatattagttcttgcattgctatttagctttccctacacaggcctcatctctacaactagaccataaactgcttgagggaaagatgtggtcttctatgtctttggatcccttacagtgcttacatagtgcttggtcccaagggagtgctcatagtattcttttttattggcagattctacataacacattgcaaatggtcacaacaatcaagactatatccatagatgtcccagaaataatatctgactatacagagcagcattaccaagccaccaagaagtctgcctagtaatgacaatgataacaacagctaacacttagtaagtgcttgtgatgcatctggcattcttccaggtactttccttaaatgcatgtgacaaccctatgaagttattacaattacagtcctcattttacagatgggggaactgaggcacagagcagtggtataggtgctcaagctggtaaatagcagagctgggatttcaactcggacagtctggttccagagtcagagcagaagcatggcacctgctgtctctctacagacagcaaaggggttggggagaggatgaactaggaagagccagaaatgacagaaagagctactaaagcttctaccatttttgctgttcatgtgcaatgcttagcaactatgtgccaaaataattatttcagcaattaaacaggtcctctagtttcttatggtgtcagcttgttaatttaaaaatgcaatttaaaatacgttcacaaaatgattagctcagaagatgactgatcacctttcttctctcattagatatctatttgatatgtctaatgtgaaatttttcttatgtttaattacactatctcagcaaagttatttacaattgatcatgatagaaccacctttacctggttagaacatgataaataattaacataaaatggcaaaaatagaagtcttttgacttctatttttataactaggaataaaagtgttagttatagcagagagaaattataatggagaacaaagagtatatgtatcaaatataaacatgaaacattgttcaagtccctggctaggcataggcccaatctgttaataaaattatgttttatttattttgtggttttcattggataaagtcaacagagcagaggaacagagccacagataactgaaaaccactttggcactgaggaggtatgcagacaagatctggaagggaatctagaaaaatggcaactttggaataatagataccttttgttttcttatcgcttttatttttgtcatgataaatattaagagtaaaaagaaaattcacattgtttgtgccatggtactcagtcaacttaggttttactcaatagcatgttgttaattaatcttccaaattgttggggtatttcatatgaagtagcccctacccccaccttgtcctttccccagactccattcctagataatcacttctgtcaattcctagataatcacttgccttactgacagattcagaggaagccatcagttttttgggcagaatgaagggacaaatggtgaactggtatccgggatgctgcctagaaccctgtccatttaagaagacacccaggtgatacgcaatgcacaaaaagcactggaactcccagcaggcaagcactgcagtctataaaccctctattgagaaaggccatgacatgtctaccagggacacagatttgggaggcagaacacaagacagggtgagggtgaaaagcaatggctacctggccacgtcagccaaatcagctccaaaaatcaatgcgatgacagtggtcacaggcagatcactctcaccttataacctgggatggcacagaccagacagattatttcattttgttttttcattatttttatttacttttttggagagagggtctcactccattgcccaggctggagtccagtggtgtgatcatagctcactgtaaccttgaactcctggactcaagtgataaacctgcagctgtcttccctgagtagctgggactacaggtacacaccactacaccgggcctctcattttgcttaatttatttaattagtcaactaattttgagggagggcagattttggaagtaaagggcatagatggttctgtagtatgcggaaatctgaagctttgctaagatgggatcaacatgaagcatctgtacatgtacaaattagcaaatgttaccatgactaacagtaaaatgaagaattaaggaaattataaggttaatttccttgaagtctctcagtagtcatttgtgtctataggtgattttgtattttacaacattgtattttctaatttcatgaaaggaaagctaaccaaattcgtggattttattttttgcctcagcctcaaaaagccttagggctgattcaggcctggttgtagcaatcggctgtctcaaaggcctcctgcatgtttaaatagcttctctcctgtttattttgcactgttttatcctgtaagctgtctcgaggcccttccaatataagcatgaggatttaaatcttaataaattgagatttgaataacagaggtaatctgggcttggggggtcttgaattattgggataaacatctctgtttctcatctgcacattatgcatgtgctgtacacattgccccatgaccaaggtcagaaataataaaatagtcatagcagaaataatactgataatatttagagttaaatagcacttttctgtttgtaaggacttttttatgtacaggttctccttctattcttggaatagtcctaaccagtagaaagatcaggtgttatacccactttaaaaatgaagcaactgagtgacaaagagattaagacacattcaaaacaatatggacaagtggaggcaataggactggaactcaggtcttcctgatagctttcccacaattttgccagatgtgttaacattatgtgtgctaacaataagactcaactcagtgacattccaattaaacttactggagatgtctttttataagcttatgacagggacattgtagaagtctggagttagctcttttttaaaaaagattgccacagagattgctcatgagttcaactctggggttgaaagtgataaacaagcaatgctcaaatacctttttgtaatctcctattattttgaaggaaggagtaaaaatatatataacttctttaattgtaatttaacaccaaaatatttcttctatcctgtaatttcttatcattcaaaattctaaggagttgaattttaagacataagtggagacatacaaatcacaaagatatattctaacaaacattaatagaaacaacaacaattaaaaaggcttaccttgcagccttcacatgtaatgacaccataatggattcctgatgatttgtctccacagatcttgcatggaataatttcaatttgagctgcaacagaagcacgcaaccagttaattacattttcttttaaacaccttataaaagtgttccctgatcagcatttgtatagtgaaaactaataacctgctaaacattatactgcattaactattcattgctgaactgtgagggtccccctagagccctggactaaattatggctgctcgttatataatagctttcgggttattaaaatgggtcatttgagaaggtgtttaagaacccacaagaagactggaatcagcatttcaaagccttcaagaactggagagttcgcagtttaggcctcagagcaaagcagatactgaaatgtttcctccaatctcattttctatcattatttttaaaagatcataaatctgtcttggctgagcattacagcttgactgctagagaaaaatacactctaaaaagtcaggtctagttaggaaaatgattcaattcaaaatattaatcagttacatatgataagaattccttgtcttttaaaaaattaacgcagttgccatgtgttaaaaattagtccatttgtgtacaatcagaacctttcaaccatagagttaatatcttgtttgaatttaataatgatgaatcctgacaaataggatgtgttgcttctgagttctttacactggaaatttagttcctggtacagagggcatgtgtttctacccaactgattacttaaagatgcctcatgctggaagacccacaaataacatgtatcacaccaaagttctcaaataaggcaaagcacatttctaagcaaacacattatacctcagagttaaaaagagcataattaaggataaaaaataaggaataattaggcaaaagaaaatccttagatcaactattaaatagaatttatatgtgaaataaagaccaatgctgagctgtatagacaggatgggaacagtcaccagtttacctggaatgtgtcattacgctaaattcattttccatggttttcactactgggtatcatgttagattacctactgagttacacacacaaacacaactgcaagtgcccaagtctatttcatttctgtacagcccttacctagccccagaccttacacagagtaatttctttgtccaaagaatatgtcacatagtgtaagtaccacacagagacacacagcccactctttcttctaatgtaatcccatatcctgggatgatttcacaaccacttactttggatttaaggtgatgttgcattcgatacttagagcacacatgaaactattggatttaacctcattataaaccatgtgtactggtaactccctttctcagggcctaatacaagtactgtggtgacttttagggagtgcaagctattctaaaagctatccatcatttttttagtgcttgcatactgagtttctttgctgtccaaatttagagattgttccagatctcacatccagtgtattttctatactctggaggctttctaataccccaataatggtgactttggacactaataggtatagtttgagttaagcaacttaagcaagttaatatgtttaaggttgcattcaacaaaagttgtcatttgcaagtctgcctcatgttaacacttggcttgacttcttcaagaaaaattctttatgaaatatggtatctaataatgtctcatactgcacagtccttccattatgtttaatatagtcaaggcaaaggtttgtgccacagatctgcaactctagagaaagcgagttacgcctaacatttttcagagacgtggaaaagccaagtggaagtagagaaatcctgaaaggtgctatcagctgagagttattgcctgcttttccctacatgaattgagtaggctagaatgagaaccagcctccttaccctgattcctaggaatgtaataattaggcaccatgaagtccttgaaccacctgttaaacagaatttatacatgaaatgaagaagacctacttggagctgcttctgtccatgtctcacctcaaggtgtaatgacagaaattagggatgaacaaaaacctctttaggtcctagcatttaagtcagcatcaaaactacctgacgctaaacttgggcctttcaagagttatcttcattccatcttaacaatgagggagatcaagcatgtctatttagtcctttacaagaatatgaaggccctgggcagggcatattgagaacaatgagtagaactgcatctggacaaactgaaaatgatatgcagtattcctgtacagtcggcctggactcacagtggattactaattagaagtgaagcaacgatgtttaaggctgtgaccaagatgcctgcctggcacggaggtctgctcatgatgggggtggccttgggagtactatactggccccagcacttccacccttggaatggctcatgtcctggcaggggtgagggtaggggtgcgggtggggagcagttgtagtacagaccccagagtttggtgccactgtgacacaggactgatggcctgagtcaggcttcagcttgcaggggttttcagatctggaggatatttgagcggagacagtcacgagatctgtggaggccaagacgcttaggataaatggactcactgtagattgacttgtatttccaaacaggggggccattcacttagatctttgtccccatgtgtctgtgcttagttccagtgggctaaagaatcagatttaattgaaacaggcttcaccgggaatctctcggtaaggtggtagaagggtttctggatagcaagttgaggtattctgattggttaaactattctcctaggcttcctcctgcttggttctcttatctcagatgacaatttcagttgcaaatgcactttaggaaatgactaaaatcctcctactccaaaagcaaaccctctgaatgtgatctgatcacacgtgttgatattcccagaaagcgagcatttgcagattggagcagggcacttgctcagcccttcatttaacccaacaatgcacaaaagccctctccatcccccattttagtcaatttccagaattcaaatgaatccatgagaaaaaaatgcagtcaatgccttgcaaatttttcaaaaggaggcagtttagttttgtcaatttgagttttcagtccaacaagaaggaggaagacaaaaatccctctgccctttgcctttcatcgtgtaggcttttcagtttcccaccaggtagtgtggtgtcttctcaaaacaatcttcttttaacacaaattatgaatcttggcccatatatatactgcacacattaactcagccagcatttcaaaggatgagttctgtcagacagcactactgtcaacgttcacaagtatattgattaaattagcccacatacatattcatcccagcaaagaggtttattgtgtagtggaatatctggagcaagatgcgcacatataatcatgaattggcttcacaatgaacaatcttgctatgaaaaattctaatttgcccacattttcagccctattgcctaaataatttgctctctcatgcaccctgtgtaattcaagcaggctctccacacctgcagaggcaaatgcagtttcaaggagctgacaacaagtggcagcgggcatcaggaaatcctggaatgcaagggtgctaattaaccaagtggtccttggggctaggctgtcatttagcactgcacttctagaagaagtttgctttgaatttttaattataaaaggaacaagaacttgggcactagcattcttaagatgacatttattcctcaggacctatcttaggagataacatggtccagagaacaatgcccattttcccaaagaattaaaaaaataaaaattgtatgacaggcacccagtacttcattctgtgggtgagtagtgatctctcaataataatctaatttataataataatatctacatgtatttgtgctaataatgtgtcacgcattatatctcactcactcctccaataccctatgcggtaggcatcacttacttaattgttactgtcatcattgtcatcatcatcattgcactcttattaagcaatcactaaccagggctcaaaagacatcccctaagtagtttgtttaaacttaacacactactcaggaattgatgtcaacatctcttgctgggagttatccccgtagtttataactaaaaataaccatcaaccttctaggccactgatctcagtttcacaaaattctggttagaattttaaccctaaaatgaccaatgtcaacgtttgacagttcttaaggccgggcagattacttaacctctctgagcctcagtttcatacttgaagattcaaggatgtgatacataaatgacataccatatatatgatatctgtatgagcattttatatatgtattctctatatatgcccatcacatagttcttagaaatagctggcactcagtaaatagtagttattattattgttgttgttgataagaaatcctgccttatagtgaaatgaaattctttcctccagactttaagctctttccgaggtggggatagagaaaagctgcttatcctccaaataacatgacaggcagttcctaccagctaccacagcaatccttcacaacattgctgcttaactgtttgccacaacacagtggtatgttgcaataagttgcaggagtgtcacagggaattggttactaataaaagttttacaaaattaaagttttttattggttcacataaaaactaaactaatatagacccaaggttaccccaataatatcgttcactctagctcaattgcacaaccaaatattttcttgaattggactgaatggggtggggttactgctggcttgccaggaaacggccaatggccgaaccttgggtacacctatgagaacatgtctgtcatacttatgaatgtcaaccaattttgtgtgtcttgcaaaaacggtcaaaaactagtgctttaaaaagcctatctatcttttacacagatctgttgatggtgtttttttctggagtgcagagaatatggaggacttttcacttgctatgttagatatttctctaatgtttgaattttttacaaccagcatgtattacttttctaagcagaaaaaccaataaagattaaaaagaaaaaccctaaggcatttgattttattttcagtaaaatggcttgagtcctttatggattagtcactttattttatcccctgtttaaaactgccagggtattaaaggcttctgcagctgcctgaatggcggcctggcttgcgtgtcaaggttagccgggggagagctgcagagtcttcaccttattccctggagggacttcaggagcaccaggcttctagaattttgtggcccccttgtttcagggcttctaaagatggtcatgcaggttgtgctctgcccagtgcggcctagctgaggggtcaaaagtagaggttgaaatgcacctggctgtgagccttgctgcagagtgactgcaacagcctggagagaggaaacctttcttcaatctgtctacccagacaagctcccttttttcaaaccctccttccaggggtagtgccccttctctacagtgctaggagtggacagttcagggagcaacatgctttctctccactctgccatgggaggccccaggacaccataagggtttgcagagagctctcattacatctccatgtggaaggggaacagaccatcgacctggacctgtggcttggaatagagtatgggtatgttccatagcacaggcatgttcaatggccatcagggatgagtagagccgagttatagctgcatcctatgcaaactaacgatgaacttgtttggccacttggtctgctaagttcattttaaatataacactaatatgtttccctagtacattattttcttctcttgattttggattctttcatgacagtatttcatccttgctgaacctcaccaaaacaattagatctccaaatagaaagccctactccttcagtaagcagtctcgcagtcatttttggcaaaaatagtaatgcctgagtttttgcagaattctatatagttttcaaagtttttatccttgttagcttgctttgattttggtgctttcaacatccctaaaggaggcagataggtattatcatccccattttacagatacggaaaatgagcctcaggagggttaaatggcttcttctctatgtccagatttcccagggttttgatgtagacatagccacaagaaagagagacttggtgtctctttcctattcaagattatttgatgtgtttagatttatgccatcactgatctggggctctcaagaggacatgacaccaaaaagaaagcactgggagtcaattcagctaagaggtggagttggcccttccaggtctccctctgagactgaactccctgggtggcctcaagcaattcacttacacctccacttcctccatccataaaaatgggaataattcttacctcccaggcaggtggtggtaaatgagtgctcacaaagctctttgaagatgaaaaacctatataaatgggaagcttcaggaagcttgccacatcattcatggcaaagattgcgatgctgtgtcctattacccatatccagctatgccacaaagagaataaaaattacacagtaccataattctcatctgctagctagacttacttaaatgttttttaatcattggtttccaagatgctttcccaagggactgatgggtccagatgttactatcttattcacaacttagaagaaaaagagcacttagatggagaggtcgcctctctatgcaaagtccttgacctagctttatctagggcttgtacggtcttgtcggggcatcatggaaatggcacgattcccacttgttaacataataaacatatatgtcaccctctgacagacatcccaagccttattattaagttgacatctgactcaaatgagtctatcaaattatagccattaaaaaaaatgttctgcatcttactaaacaagccacttctcaaaaacttcaactggattgtaatttctccggaaaacttaatggctttaaaaaaaacatttttcaataaaaagtgttgagtatacctgccaaatgcacacacacacacacacacacacacactcctcaaaccatcaagagatcaaacatttgtgaactaaatttaaaataagacaaaattgaagttttggaactttgacgatttttcttcagtcttttaaagacttagttgtgtaagagttaaaatactgcgccagaatgtcccatctgaattaagagaaagctgagctgtgtgtgcaggaaatctctgaagaataaggaagccaggcacatcttctcatgtggctttctgtgaatatgcaggtggttctgacaatgggaactgaatattaatcctttgtaatatatttccatccctactagattaagctttctagagaaactgactcacattccctgatgcatatgtatctctgctaaaagccaaatccaaatgagcacttttatccctagacagggaaattctgtcaaatcagagaggaaacagatttttcatctagaagaacagtgggtggcttttttagatccagttctctctagaattctcctatcacatagtagtgcacaaactgtttaaggcagttgactctataccttttttggtatctacctggtaaccagtttaaaccttgagtgaaagacctgaacagcaagagaataagcttcctaatacttcatcctactcatccagtgggtcagatactaaataagtaagttctcacccaataaatgataccaccaggatcagcaatacaatccttttttttttctttttgtttttcctctcttttgcctttgtaaacaacagaacgtatttgttgttaaggatttatggggttatgtgatatcaagggctaagataaaggtaattggctatttaaccaatggttctcagttggcgtaaggtccctctaagattctagaattaactacattttaaaatataaagtccttgaagattttctaggaccctgggatcagtaacatttaacaaaagtcctctttctctagaatctctcggggtgggttaaatgtcatttcatatcagcaggaaagagaacccatttattttgctaagtgattagactatgctcaagggaaattcctaataacgttgtttccaacaatggtgtcccttacataattctggataatactagacaaaaaaagtcatctgactcacagaactgcatacgtattttcttgcgatcaacctcactctagataccaattcctttttttctccttaacaggaacaattacgctacatttaggtgaaatcctccttacagctgagagcactggggtcaactctttgctttcattgctcaaggtctgtttttcacaacagaaaagaacatctttaaaaccataccaaatctggtgatctagtttctgctcaaccgaaaacatcagaattacacttactgcattttatgaaacaatcttactttaaccaattacccccaacattctcacacctaagcctacgagaaaaccactccactttgcagctgtcttaacttcacaccaaatttcacataaccccacaaattcttaacaaccattgattactaattccacctgcacaatttccatgaccccccccccccaaaactgtgcggtcacaaaacccagctgcatgaagtaagatgtgcagaaatgggtcaaaataacaagaatccagattaagtcataaaagcttaccaggcaaaggaacccatcatttctttccatgagctccgatggcattctgaagatctgctactgctcattgaatagatgtcactcaagaaatattccccaactaaataaactggattcatggtaaaagattggaaataacttagaacattaaaccttgaaaatgcatttacatccctctatagcaagcccagaacactaaaaagacaacatatttatagtcacaggaacatggtgtcatgacaccaaaacttccttggtccacagatcattttagtgggtgaggactgttaagagaattagcccacagcctgtatttctgctccacctctgtgctgttttccatttcaaaaaagtgtccttagaattaataagaggatgaagctttggatgagagatgagggaaggatccggtttttattaaaaatcacaggcaaattatttaggcttgccagaagcggaagtgtaaatgttttcatattaaccactttaagattgtaagatcttgaagaattagaactcctagaaattcaactagttccttcacctccagtttccaggacatggtcattaacatctaaacaaaaaatatggcaagttctaagcctttcaaatacatcacagatgtatttctgaactgtggctcaatggtatttcaaaaaattctcttttgtaatgcttttctaagacaaccagttcagccaggcatactaatgaccaaacaacgtgaggacttgtttctgactttccctaaatgcatggtctttaaacttgctgattaaagaaacatttccattcttaattacaacatataagctcaacctgagaatggatagcaatatttgtggatagctgaagcacagttatttctgtgcctattcccaaggggaagtggcaggagctggtggctatttcttagtaggaaagggaaatacagaaagaggcagcagagctttggggatttaagtagttgcgagacataaggagaagaaatgctctggactaagctaagagattgtcagatttattttaagaaggtctgacatctgagcatcaatgcacacactataacacctcataaatgtcatttttttccccaagaaaacgaaatgtatagcctctgtatttatcttgaagccacttatttttatgtaagtcatgcactagaggcaaagtaagaacacaacagccatgtaaagatatcaaaacgaggcccgcaccactgtccttcctattccattttcagtttctgctcctctagtccaaggtgcttcttttgcctacagagacaaacatttcagatgacattctatgactgtcctgaaaacactgctatcagctatccactgtttggcaatgtgtgtctctgtcacttaagatagcttgagtgagtgagtgtgacattatcactgcaataagtgaatctttctaatttgcagtaaaagtataccattcacacactttggtacttcagtacggcaaggttttgaaatccatttcacaagtggtggcagcacatttcacatcggatggaaacacactctgattgctaacagctgctgtgggcacagcttactgtcaaagccagagctcagaatagcaggtcctttttaatgccaatagctgctaccatcttaaatggtaacacaggcacacacacaccacacatacacacacataccacacatgcacaccgtatgctcacatgtaccacacatacgtacactacacacatataccatgctcacacacaccacagatgcacacctcacagcacagcacacaggcacacctcacacacacggcacacaggcgcacctcacacggcacacaggcacatctcacacatggcacacatgcacacctcacacagatggcacacatgcacacctcacacacacggcacgcatgcacacctcacacacacggcacgcatgcacacctcacacacggcacacatgcacacctcacacacgacacacgggcacacctcacacacatggcacacgggcacacctcccacacacggcacacgggcacacctcccacacacggcacacaggcacacctcaaacgacacacgggcacacctcacacacaagtctattcagctgcaagtcctgcctccacttgctgagaacctgcatgactgggcaccaaggatacggcacacacacgcacccaccccacatacatacagtccacacacacacaacacatatacaccacacgcaccacagatgcacaccacacatgccacacacacatacactgcacacgcaccctacacacaccccccacatgcttacacatacacctcaccccccacccccaacatgtgggcctacacacgagtccatccagctgcatgtcctgccaccacttgctgagaacctgcgtgactgggcaccaaggacacggaaaggatacacagaacccaccagcgcacctcgtcttgttacgttagcttcactgcataggaattaaggatgaaagtgaaaacttttttttttttttttttttttttttttttttttttttttttaaggaaaaaggagagagttgattatgaccttgaagacaaagtgtagagatttgatttgcaaaatctagagtctggggttgaatctctaccctgacatttgttagctatgagaacttggacactttcttaatctctctgtgcctcagtttcctcacctttaaaacgagccctatctcattattacagggtacacaagtaaagtgcctgtagcatcagtgcccaccacatagtaagggctccataaatgttagctataatcatcatcactgtcttttttttttctttagacagggtctcactctgtcacccaggctggagtgcagtggtgcgatcacagctcactgcaacctccacttcctggcctgaagcaatcctaccacctcagcctcctgagtagctgggactacaggcacacaccaccacacctggcttttttttatatttttttcagtagagatggggtttcaccatgttgcccaggctggtcttgaactcccggactcaagtgatctagctgccttggcctcccacagtgctgggatcactgtctatcttttaaggatgatagtatttggcaggggctgcagctggagttgagggaactatcagaagaatgaaggataggtcactgtattccttttgttgtgtaacgacatggagtttagcagctttatttctaacacagaggcctaatgtgagaaacaacactaaccagggcacgatagaaagaaaccagtgtttctttctagggaaagcccacagtgaggctggcatcttggagaggtggtaagtggaggaagtgggagagaggcctcacacactggtaaagtggggaaaagactgaactacagggttcggaggctctcacaactgcctgtgcagtgagcaaaattcaccaaatgcctgtaacgctttgtgaccctctttctccagagctcagcctcctcttctgttcttaggcatagtgctgcactacataatcttccagagccagtcctgctgtattacactgtgatgtgaagagtgagctgaactctcatttccccaacagggacctctttttatggcaaaacccagcaggtttcatctcgtcagggaaaagggatagaaagtggaagagaattctacctagtaactaatttttcattttcattggtttaggaaaggaaatacaatgaactgttctcttcgagatccagaataaaagttctggcagctagaacaccgtttttatacaccgaacccctcgtgctctccctgcttttttttgttgttgttgttgtgcttaatgttagaaaataacattactactatgaaacgaagagaattttttttcaaaaccatgtcttgccattagagatgagacaaggcaacaccatgctaatacgctgttgatgtaaaaataaaagttttttttcccttcaaagtaaacaagttaattgaacgtgctaggacagagttaggttatttttttttcccctctctttgaaggccactaattgtgcccttttgctttaaatcaatagaggcaaagcccacagcagatagtgtcagtaatgcaaatccatttcctattgtaattcacttttcagaacaaaaccttttccatcagcaaagcattttagaacctcaagctacactgttcccacctgcaactgtctaaggtattggaggtcaaggacagtccaaggccaagtcaaggaccatcaggacacagaggagtaacttctgaggcagcccccggtggtaacataaaagcttaatatgcatcagacaagtgccttcgctgtgagatgttggggaaccaagcccagtggggtggctggcgtcagctcagtgttccagaaaagccaaactgttcaccacgacttgccctgattttgccttcactgctattcaaagaggcctgaagcagttactgaaagcaattccaagaaattgagttaaaaaaagaaaattaaagtttagaaaaaaatcatttgaataagtgcgtagacttacaaataaattctgaatggaacagaatatttggggggttcataacctttggtatatttgttttaaaaaccagccgcacctcaaacacacccaccaacaatgagacgaatggctagcacttatgaggaattattattcatttaaaataccctttaaactatgtcacaaagataaatttgtttagtccttacctgtccccacgcttcaaaataaaccataatatttctattgaagccagtttcttgttcttggaatcagctttttgagttgtcagttaggctagatgagctgattagtatggaacttaacactgtcagtagcaaaacaggtgctctatcagagaaatatcaatccattttaggaatgtttttgagagtgaactgtggtatctatgagagaaaaatcaagccttttccctcttctggtctgctacggtaaatggtgtgacacaaggatgtttcactgcccaattagcgtggtccattttaaagtgaatctgttattttcctttccttcctcattcttgacttttagacactgcaagttaacctcaaagaatgtcttctttgggcataattttacaaatattctttaagatcctttatcacatttcaaagcactttgcgaaaacaaaatgtcctcagtggggcaggcgagatctcaggaatagtgatagaattcattttaaataagtctgtgtgatttttctactgtatcatttcagggactttgcttaaagaggctttaaggaagaacttaaaatggagaaagccaacttttgaacgtggtgatcaggttgccttcagtctcttctacgtcagggagtcaaggggctgtggaaccatccgttccacctgctacatgctttctcacccttcttctaacctgacaaatactatgtggcatctccatcatggttgacattgctaggccctaccttattcaactctaactgaaaaatggggagcaagaagggattatgtaagaaaaaatgaaaaactttgagggccaactaacagatttcctaaactaatgatgtattttaatattccagggatttgatttaggacaaattgttatttggatggatgcttgtctattgagagagtaattgttaaactaaaggaaactggtcacaaatactttagcagtggctataaatgaccagtgggccaaggattttgagatcgtgagagacttctccgggaatgttgtcattcatttcactccagtgtggctcttttcctccatctgcggtaagccaaaacagttcccaggagaaacagatagagacaggaaaataggtagcagttctgtatagtcttcactaacagctcataaaccttaaaaaaatgggattttaataaagcccatttttatatttttaaacataaaatggaataaaatgatagttccaaaggacttcctgtggggaaagcttcaatgtcacaactaaaatttacatccaattccccagcacacccttgtcctcaacccgagtttgcgtaacagaggtttgctgagcctggaaacagggaattctgtgtgactgcagtaaaagcaccaagcggcctcatgatcaaactctcctgcctcttagtgatttctgaactggtggctgaagtcagaattgtccgtgattactatcagattatgacaatgaaagtcaccattctgtgttcttttgagcaggattttccctcgtgttgtccctcccttcagcttcccacactcactgcttgcgtagcattttgttaggggagtagcagttctgacacaaccaaagatgtgtacgatcaacagtggggtaatgtggataactgacacgtactgtgggcgtggagatgctcctatgttgtggtggatgatagccttcgaatgctctttgttgtcttcattgtcatccactctattaatgttctagaagaaagctagtggccaatattttcttccaacaaattcactggctccaggaaccttgacaccaaaatgaggattgagcgtcaaagttcttatgttgtcattgccccaaactacttggagctacttcttatgcagctgctctcagtgccaatgagataagacacagctgtactttatagtccctctcctccttttttttttttttttaaagatagggtctcgctctgtcacccaggctggagtgcagcggcgtgatctcggctcactgcaacctccacctcccccagggttcaaaggattctcctgcctcagcctcccgagtagctgggattacaggcgcccaccaccacgtctgggtaatttttgtatttttagtagagacgggtttctccatgttggccaggctggtcttgatctcctgacctcaggtgatccacccactttggcatcccaaagtgctgggattacaggtgtaagccaccatgactggccttttttttttttttttaaggaaaatggcctggtttggtttcttcacttacctttttcagcatattaactattggttgttttcaaatatcaagctcacttttctaggagaactatggccactatggagaatatgaaaacattgctgaaggaggtgaaagccatttcagaagaagagttatatattagcttttggcagtgacagcgttatgggcacggacattcagcctttccagttgactgctttgaaggggcaatgttcacgtggaagtatacctcctagtatgtttgctaaaataaaatcagcttcattacctaataacataaatgactttgggagaaaactctgagtctcatgttttatttttcctgataatgctgttcaattagggcagactttgtggaaattctgatttcattacccatcactgctgcatgaaaatacgctttctgaagtcacgctctgaaagaaactaagttgtttgctacaactacccctacacagaaattagaaaattatatgagaagaagtttacttcagcctgcagttgggacacaggttattactgaaagtagtcgtcggcatggtttctggtttcacagtaaaagaagacgacttgaaaggactcagtggttttgatgctcttctgaaatgaaaacactcagtgagcacatagcattgggttgtcattaatgtcagccaagcgaaaacactgtctccatgaacactgcagtcatttccccgccgagaccatgactttccactccctggcatttcgggcactgtgctagtacttttccaaaagagactcttaaggcaattcattctagataatcaaacacacacaacagtcttaaatgaataggtggcctgaatttgctaaagtcagccaacaatttccaggggagaatgtgttattttctgagaaatactgtaaggcaatgatgaaaccctcaagtgctgggaggcacgaagtataactactacacttcacggtaaatagcattagtgtatttatttatttatttatttgagacagagtctcgctctgttccccaggctggagtgcagtggcgcgatctcggctcactgcaacctccacctcccaggttcacaccattctcctgcctcagcctcccgagtagctgggactacaggcgcccaccaccatgcctggctaattttttgtatttttagtagagacagggtttcaccgtggtctcgatctcctgacctcatgatccgcccgccttggcctcccaaagtgctgggattacaggcatgagccaccgcgcctggccaatagcattagtttaaaatcatgttgtggataaaaatgtaatcaagtagctttacattgctcttattaaacttgatacacacagtttaacatggtcttgtggaagaaaacaggaaaaatctctggcattctcgatatgttctatgatatgtagcagctcttatgttctgtgtctgtcgcctattttgtaaacaggcaacaaaacaccatacttcatcccaaagttacgagaaacaaggaattaagcatgttgtgttggatggagttaatgatataacgttaaaaaataaccccacagtttccatctactctcttgctctctgcaatcaagctgggcatgagagaagaaaataaagtgattttcttaggtagcgagcaagtgttggaaagtggcatttactatatcaccagggcatatttgttgttgttatttttcctcccccattcattgcccatgaattaatttaagaaacaaggcatcacggaataggctaaatataaaagagtatttgctatgttttttagtgtcaaacactataagaccaaggtactaaactttgaatgagaaaatattctgcagtttctcaggatctcacatgtttgtcatacttcttacagtggtagtatactatttttaatatcacttttatattgccgtgatttttaaacaccaaggtaaattctcacagaaagattgcctggggataggtatgtgtgtgtgggagggaggatctggtgatactcatatggtaatctttttatttcatccattttctctgctttcaaattataaattcaaactataacgtcactctccaccccctcccatctccttcccaatcaacaaaacaaacaataaaattcatattttactatgtgtattgtgaaacagcctacaataggacaccagtgctttttaaagtcctactttttataaagggtctgattttcttctggccatcaactgaattgtaaggacaacatagctcattttatgaaacgaaagtgatattaaaaaactaagtggctgaagatgtaattgtctatatgtgagctgcttccgaccttgaaaaaagtgtagaagaggggccgggcgcggtggctcacgcctgtaatcccagcactttgaaagaccgtggtaggtggatcatgaggtcaggagttcaagaccagcctggccaagatggtgaaatcccatctctactaaaaatacaaaaattagccaggtgtgatggcacacgcctataatcccagctactcgggaggctgaggcagagaatttcttgaacctgggggatggaggttgcagtgaaccaagatcgtgccattgcactccagcctgggcagcagagtgagactccgtctcaaaaacaaacaaacaaacaaacaaaaaaccaagaggcacatttaagacttgaaatttagatggaaattttaaagttttaagttgttcatattctaccccaaacacattcatctcaaaaaataatatttaaagccatagaatttataatttatgcgtcaatagtttctcctttaagtggtcaccaaaaagatatcaaactttttttgctataagagcatatttaaaaaatatcaatgaaagtgttaccagttttcaatcctcctcacttggacattaaagggattaaagttattgtcagcacacacatggatcagctttcaatggaaaaaaattaatgttttttgatgttgtttcttttccttaaggcttaaggacactaggagaaagacataaatagaagtatatattatcatctagatggtgactctccaaggggatgatgagggaaaagaagtaatgctaccctaattctgaaataataaaagctcaagcaatgaatggctgaattcacacctcaaaatttcatggaagacaggcatacaaagataagctttcaaaattgaatgaactcattaccacaattaaagaaaacaaaaagaaacattttgcataactgctggttttgctgctccttctgctaatttagtttgtctggaagagccactgtgtggaccacccatgcttcaatgcacttaaccaatacctttagaagaaaacaggatagctacaaagtcataaaaagtggtatctttttatgtttcagatttccataaggcgatttcacagtattgcagagtgaaatcaattaagaaataactatagctatatagggaatatgcaacacattaatatatttatggagactatatctaggcacatttattttcagcatttgaaaattactggtgagagtgagtaacgtcccttccctgttgttttgataatctcatgtcttttaagcaaaaggaaatgtatactgcaaaatagctttaccactctgacctcaatatggagtaaaatgacagataacaagcagaagccggtcagtttcacaagtaagtgattctgatgctttggctcatcctggtccctgctcggttcccacatcctcatctggctgacttagttaaaacctgccatttctaaagtttaagaaattaaacatagtttgggagtacaaagagccatctttgctctgatctcattaacaacctcataagagttcatttccctcactaactgtcctcaggaatgaaagttaaaagaccttgaataatttttcctaccgccccacaatgatactgtactactgtcctctttcctggtctgaaactcctctggaaagagatgcacagcctctagtaaatcatagtttttgttttgtttagtgtactctaaagagctacatggaaccttttaaatcattcaatgccaggtccataaagacctctgtgattaacaaatcaaacccctttcttttcagtcaaggcacctgagactgagaggtaaagtgactgtcctaaggttaccaagcttgggcaagaccaaggtgatactgccaccatctgttcattctcctgccaccttttcaactggggtttatcccaacctcctcatttcacagagaaaaacagaaccagtgtgaacagaaacaattcacttgggaagagtgagccgaggctcttttatcagtgtaggtggttgaacttcggtagccacaggggacctgactttgaggacacaaaacacaggatccttcgtggttcacagtggtggtgttagggagaggcagtgagccttgcatcataggtagaacacgatgcagctgcaggtgcagagagttatcagggagagaagggcccagaagactgggaaaatgatagtggtgtcaaacaggaaaattacactgaaattacaccatgtctttttacattttcctcagtctccgtctgagccacaagtgcactgcagtcatttcagagatacagaagcttatcttgctttttgaaaagtttttcttaatatttgtcctagggtccacaggaaatgaaaaacccaaggcatccctcgccctctccccgcaagtcacctgctatgaatacctgcattcattctacaaagcctttatcagtccctggaatgccacgtatttattagctgtctccacacattaagaataagatgtatagagcaggaacctgtcattcttctccatcctgtcttcccagtgcctgcctcagtgcctgacacatagcaggtgctccaaaggaataaataaattaggaaatcctaccacctgcttctagcatgtaatatctactaccctggagtggaatgaaagggttattaaaatacccaatgacagcctcaggtctttccttctagtgtggaaactacagcaagaaccaacacaaattaaagtgtctaaaaaaatcaattggggcaggcatcttcttctgaactacatttactagagcctgccacccacagatgtcaaaggaattcacaggattaaaagaaaaggctggaggtgagaaagttaataactactcttgtgacatctagggctgggctacaagtggtcagcacatggacctctccatatatgttgtcagatgtcaaggagtggctttacagatagacagccttggaccccaatgctaaatcttccacttattagcactgtgatcatgggcaagttatttaacctctccaaacctctatttcctaatctctaccacagagataacagtacctacttcacagggctgttatgaggctcaaatgcaagaatatatgtaagcaactagctcaatgcctggcatacaattgtaactgctattactattgttatatgagctattgatatttttatctgatcccagataatactcaataatcaaagttaatctccatctgcttttctgaaccaggaattactgctttatcctgggattactataaggtcaagatggcaagtgagtttcagctcatattccgagtcacatggatttcaagtgaatgcttgggggctggttgagatgcactgtgctgtgattgattgtgacatgtgccaagggtgtggagccaggcttgttggttggttctaatattagaattggtaagcctcttgtagtagtatcacagagactaacagctattttaatattatataataaagcatagagaaatcaaaagaatgggctaagagtcagatggtctaagttctaattttagctctgcaactaactggtgagaagatcagaatatgccaccccaaattatgacactttggcatgaagattattttgagctgaaagcaactgagaaacagcagaaaaagctctctaccctacccctatctgcctataggcagggcatacatttccccttgtaaaggtgccctctgccccaaccccataccaggaagaggagacaacccttatcactacagatgggcactgacttaaatctgctaaaacaaaccttattgaagtaacccttgtcttccattagttcccacatatatttaccttcccacaatatatggcccctagaagcctcaaaccattttcctttatcttgtcacttctccataagtttattgccctttgttaaaatggtatataagcctccagatctgatgaccttcttgggggtattcacttaatttctgtgaggcctcctcacatacatataaaataatcctttttctcccgttaacctgtcttttgtaagtttattttgtggggccccagacactgaatataagcgggtagaggaagaagttgggttttttcctctctaacactgagtaagtgattttaatccagtcacttctctttctctgtgaagttatttcccattgaagtactgtgatttgctgataattgattttttaaaatgtaagtaaagtgaaacacatatagctatgacagggcctggggtacaggatgggtatttgttatgattatttgaaagaaaaataaaagcacaaggctattatatggaagtgtaacagttaaatattttctgtcctcattcaaaaagattgactcttcctatcaatgaggaatatattcacaatgagataaaattgcaatatttttggcactaaaaaaaaatcagcaaatgcttagtaattctccaagaaagacaagactgttgtgaatatgggggctctttaataaccaaggcaccatttaaaaatagctagaattaattacagggctaatgacccattgaaaggcttatttaaataccaaagccagcactgaacaatcatggaaaatatgacttaaaagggctttagagagcagaaaccaggaaccgcagttcaaacaaaaaacacattatcctagaactctagctactttggtgagaaacattcaggatgcgaaaaatctcaggggagttctcaggctgggtaagagaagccactaggatcaacagaaagacaagaagatgacacatacggtcacctgtttggaaaagaaggactgccatttagcattcacccaaagagaagagagaagagcccttcaaaaaccattctcccccaatcatcaaggctttctttcccccacgctcaccccctggttttctgatgtacccacccatttttaatgtaccataggataaaattaaaatttccacagagaggaaaaaatatattgtaataagtctctgtggccactttagagctgcattatctccaagagcttcctgtgtcttggtcctctgtgccctgcatccatgccatcataagccaaagaagaggtgataatcttcagcgtgccctacttgccaggcaaaaatgatgccactgcagttcttagcttctctctgtaccaaaatggcctttctgtatgtcagtatcctgggagcacaccaggtggccagagctgaaacagtttcattacttcattcatgcccattgattaaatgcattactcttacccttatttactgtggcctagacatgccttgtagttgccttgctaagttaaaagtgtcataaaatcaaaaggttccaaagcccttgagagctcaaggtggggaggtaggagagggagtggggcactctcgacatatattggtttcaaggagcaaatataaattttagtataaattgctgttcacaataacgcttttaaaccagcaattgtttacactgtactactcgaggaaccctataattattctgaaagcacttgccaacgtctaccctgtttcataattgccaacacagccttgttcaaaagaattagtggcaatgttaaaattctgtttggtactaggttactgtttgaaacaattagtgattgcacgatgctgggatatgcaagcagaatggggccaataaagtaccctaagaatgaagtggtcttgtgttcatattcacaggtgggaagaaaaggaaggtggtggctgaaacggaaaaaaaactgcttgaatttttttttccttttttcttactactttcccaagaaatactgtcatctgttgagcaaaatgactttaagaaaatgttttttcaaatgctggaaatggtagtgatttgaaggaaaaaagataacccacttctccctcttccccactccttcttgcctggaaaatatgtttctatttccggcctttactcctgatatttgtaagtgaatctgggtagtgattgtggaacctcggcttacacatctcaaaacacccatctgtgcaggtcactggactttgctgacctattttctgctgtttctttctgttacacaaatctcccccacttgaaagagcaatagtccctctactttccaatgaagcacagacagcagagagatttctcactctctgtaaatgcaaaagcttttggaatgtctggcatttcaggtgagtgtttaggaaaaaacggatctcatcctgggtgtctctcccatctttatttcatgctttctcttcttataaacccacaactgtggacaaggggatctgtgttccccatcgccaagtgaaaatacattctaaatctaccctcaaaattgagggtgctgtgcaaagtttcataaatagaaacagggaggagaaaaatctggcatgacaacttctgaatttaagccatttattctcacctccaccccacttctatcccgccttttctcttttatgaacaggtgatataaaagcagagaactaaggcagttacctaaataaattttgtattacctgtctaaatattttagggaagtgttttttctattctgagtgtccaggctattttcttagttctcgtgttcactctgcaggtgaagatattgtcactgactggggaatgtgcctgtggaccataacccaaaggtggcatcttttgtgataaaacaggtataaccctgtttcatgagtctattggccacgaaagagatcctctatgcctggaagttcacggcttcccctttctcttcatcattttctggttctgcgggaggctccatctttgattcaaacctcacttcttcctaaaagccttcgtaaatgaagaaaccttgcaaattacagtggatgtttcccctcaccattcatgtatccagtttgtacttccttatcttccttttgtgaatatggtggcttgccattctgcctccaggaacacttgtttgtccaccccaatccaatgataaaggacaaagaaaagatttatcagagcatgtatttatgcatagcacatccccaaatgcttgaacagcaataagtacccaaaaaagtactgtttaggtagccaactcccactgtctaatttaatcccactgaaactggatgtgtctttttctccttttgttctaaagaaacttgttctactactatttgctggcaggaataattttctgccacctgtagtactctctgcttctgtgaaggctgaacttcaagttgctgtgaaagaatttgcattatccctctatagtcatacctaaaattaacccactgtcttaagttaaataagatatagaatgctcacaactgttatggttatcggagaactagagagtgaggctttctggcactacgagaggatgtagaagatgacacatgtggtttggcctttatttggaagcagcaaaaatcacagaggtggtggttacaagacaaaaaaggccaggggagtgaacacaaagttttggctgagttactttgtactattatgtaatgagatacaagctcggccttgcttgagtttaaataaccataatgaactgttataaactctgggatggaggcattataaacataggaaattctgtacttggtcctccagttggtcaagtctacttgtattcataaggaacacattcccttgggctacaagagaaacattctgcaaactggaaatagaagttactttctggatagttctctcaaagaatataatgaagtaaacccgaacttcagacatctctgtgatcatgtattttagaacatcaccagagcaaacagcaatgaatctcagctgattagagctttagtaagtaattgggatagctgaatatccaaataactggagtgttatccaagtaaacacatgaaaacaaagagggcagttatcataaatatttttaaagaaatatttctaaattatgacctatttcttttctctgtagagaattttgaatcgaatttactttcttgatgataaacagtcatcagaaattttattttaaaatttattagaaatttggagagcaggatgtttggcctctgaatgggaaccttagtagtgccaatgacgaaagagagaattaaatatgggtgatgttgagaaaaccaagatttttgtctagaagtaagcccagtgccacaccgggggaaagggaggcaaacacaagactgggccacatctccatggtctctggatggaggacaggtcaggaggcctttggattcacttacacagacgccagtaagaacaaaagcatcacctgaagacaggatacactgatggagtatttggagaatcccaaaaagttcatccctggaacgaaaatgatagcctatctcaaaaaagctactaatgggcattaattagttggccactgccttgtttattacaaaacaggaacatctcatgacttttttgtgtgtaccataatttaatagatctcatacaccagaattcagatcattaatgtctgactgaatatttttgttgggcagtcctgttaactaagactggattgtggttaaatgcgtatgtttgatgtttctttgaattttaatagtaatttcgattcagtaaatgctatcactgtttcccccttctaaagatatggttggacttcattagtaatgttcaacttttcataaagatggtgaataccaccttaaaacctattggagattggttttatgtttagatttatataactggttatgtgaatatatttaaatacttgggaatttccttcactgtctcagaaccaagcaagagtcacctgtattttgtgttctgttgcctcttaaaggcaaggtctgaagatcaggtagcaatgtctactttatatttttggctttgactgtgccaatctcattagaattccctgtatctaaaacggttccctttacttacagaaaggcattttagtgtaggctttagaaaagtgtgcaatatttagagtgatattatacactaaagtgtaatagttgagaagagttaaatattttttatttgatattacactttggtgtgtagtgtaatatcaaatatactttataaataataaaaatcttataaacaacaaaatctaataaaaatcaaataaagaacatttaatattacacatcaaagtgtaatacgaaataaagagtattttactcttctcgaaaaaatttattagacacttatgaaaaaagtataaaattattgtatatgctgtaatgctctgaaggccttctaagatttatatgacattttgccccaacactaaatggccctggtttttatcctttttatgttttttcttcctccttcatctgtagttttccttccttctgtagtcatatgctagatcttatgaggccctccctctacttgtaattaatattttgtcttagaattagctatgtcttggaacccaaccagataactaagcttgtgtaaaaaccaattataaataggatgtactgggtctaaagagatttcctctgaaatcaagtgcattcactgtagtgcttgaactttgggtctctgttttggcaacctaaaggcctatttgcttacttcctaacttctcagatggtttgtgacagagaaggttgccagaggacagattcatcacaggtgaggtattgctgtagtaggaaggcaaaaaaggtaattgaaagaccctgttcttcaaattaccaagagaaagatgtcgtgcaaggaataggacaatgacctttctgttatttgcattacggcttgataattatcacaagtacattcagtttgagagtttctcgatctcttctcaatgccttcaaatagatatgttacaagacatggcaaattgattctttacctaagcgaggccagtttcatgttccaaaaatatttcaaagccaaatacacataactttataaatttagccactgttttttttccccttgactgttttattcttgactgccatagccaagagttaatatagttgcgttttcttaaggaagcaacataagttctaacaataaatctgtgaaaatgaatttgtgattttagttcatttttggatgatttcaaccaatcattgtagcccatacctggcaaagcaaaaagtttatcacagcaactccttattttgctccctatgagattgtattaaatttagatctctccagaacatttgactcccttcttaaggagatttatgttgaaaattctcacatagccacaaaacgcagtccattttatattaaaatgtgagtgtatttctaaaattttttcttttgttttgtttgtgttctcaagaatgctttctaaaacaaactcatgtgacataaacagggccagcttgccctagttacacccttactatttcattaacaaaggaactgggctgccattctgtttttgttatgcttatgctgaataactgtactcagccagctgccatgacttgtctgtaatcccagcactttgggaagccaaggtgagaggatcacttgagctcaggagttcaagaccagcctggacaatatagtgagaccctgcctcaaaaaaaaaaaattagccgagtgtggtggtgccagtctgtgcctgcctgtagtctcggctactggtcggggagaggggcctgaggtgggagggatcacttgagcctgggtcacggctgcagtaagctgtggcaacagagcaaaaccctgggtgacacagcaagatgtgtctcaataaaaataagtatataactgtattcaaatgactttcttcttctaatgtggctgcctgggcaatttgtccattttttcccagcagcagctgctaatgtttaagtgtaattttacgctaaattttttttaattaaaaaaattaaaagttacaccagcttattgaagcaaatatagaaaatacagagaagtatatggaataaaaaataaaacatattgtcttcactgcagagacaaccaagtctttaaaaatgtacatgtctgtatatacacatctgtactcccacatgagcacacacacgttggcagtgatgttttaaaatgtaagtgtttttatacatgggaagttttaacttgtgttttttttttttttgttttgtttttgtttttttttttgtttttgagacggagtctcgctctgtcgcccaggctggagtgcagtggcgcgatctcggctcactgcaagcgccgcctcccgggttcacgccattctcctgcctcagcctcccgagtagctgggactacaggcgcccgctaccacgcccggctaattttttgtatttttagtagagacggggtttcaccgtgttagccaggatggtctcgatctcctgacctcgtgatccgcccgcctcggcctcccaaagtgctgggattacaggcgtgagccaccgcgcctggccaacttgtgtttttttaaatatggagaatgcaaaataataataaataatgaggcataattataattgtgatgacaagaaagtaataaaaaaaagttaaactctttaactctgaaactaacattaagaattttatcccgtgttgtagatccaggaacacatgaggaagatgctttaacatctttatgttaaagctttaacaacatggctctcaaggtttttggacccccttccataatgtaatagattctgaattgcaaaataccaatacattttgttaaagggtcaagaactatagaaggaaagtacatctcaatccaaaactatatccattgagaaaagaaaaatagctcagaaccatatgagctatataagtgatgcaaaatttatcacgccctgagagacataatatgggacttcagtgacactccccccatgcaggggtggtggtgggggactatttaaagccattttgttcctgactagatgctgcctccattatcttcatgttactggaatctgtgatacacagaacaatagcttatgggtttaacaaaaaaaaaaattttttttctttttttttgagacggagttttgctcttgatgcccaggctggagtacagtggcgcgatctcggatcaccgcaacctctgcctcccaggttcaagcgattctcctgcctcagcctcctgagtagctgggattacaggcgcctgccaccaccacatccggctaattttgtatttttagtttcaccatgttggtcaggctggtctcgaactcccgacctcaggtgatctgcccgccttgacctcccaaagtgctgggattataggcatgagccactgcgccctgccagtttacaaaaattttgttgagacagagtctgactctgtcacccaggctggagtgcgatggcacgatcatagctaactgcagccttgacctcctgggctcagacaatcctcttgcctcagcttcctgagtaactgggatgacaggcatgtgccaatatgcccagctagtttttacattttttttttgaggcggggttgggggggggttgcttttgttttgagacagagtcttgctctgtcgcccaggctggagtgcagtggctctatctcggcccactgcaacctctgcctcccgggttcaggcgattctcctgcctcagcgtcccaagtagctgggactataggcccgtgctaccacgcccagctaactttctgtattttttttttttttttagtagagatggggtttcaccatgttagccaggatggtctcgatctcctgacctcgtgatccacccgccttggcctcccaaagtgctgggattacatgcatgagccactgtgcctggctttgaattttttgtagagataggggtcttgctatgttgcccaggctgctctcaaactcctgggcttaagtaattgtcctgcctcagactcccaaagtgctgacattacaggcatgagccaccatgcctggccaatagcttatgttatttaaatataaattcttggtaaacaatttagaaactgcctcttatttcttcctttaaaaattcacttgtaactgctgttaatccgagtgtacaaggcaacttcaatctattctcccaggtggctatcctcaagtttgggctcaaataaatgctatacttaatcatattttctgaatcttgttacttaaggcggacacgtataagttgaaattctcccaaagtgaacacggagtcagtctaccaaagtaaaatcaaactaaggtgaatatttaaatattcagacaaacatccctgctattgaaaaaaatcacaaatatttgcttagcatccactaagtgcaagatgctgatggtgcaaataccaggtgtgccagacaactgctcagccttttatacctcttggcctaactagacacacctgcagttttccacatggaattcctcttcttgcactttggcctaagcacgcattttttctaatggtggaaaatattaaacagacttttgctttagaaggtatctcacttcacttcaaagcaaagtctaccttgtgaatttaattagggaaccttcatgagattttaccccttatgtatatttccaactattttagtcatcaagaacacttactgttccaattctgccacggatgtggtcaatcttagggaaatttctttgagcctcagtttcttcatttgtagcatggggatcttacccacctaaaaccaaactgagacagcacagtgcttgggggacaggagactctcagtaaacagcagctcttattgttgtgccccagagagtctcttaggaaacgggctccccagagcttcaaaccatggcttttcctgtgtggctacatcacagacattgtttatcagaggacacatcttctagttcactgtggttcattcttggtggtcattggaagtttgctccattacagcaagtacacacacaggtagcgatggcctacatatttattttcaagcaatgttttccagcagacatggcattcagtgttgtatgaaacatccccatacaattccacagacctgcatgcggctttcactttgccctctattgtacagcctttcatgggctgcttgacttgagcacacttctcactacatacttcattttattaggatatgaattttatatccagataatgaatccaaagtctgagaaagatgcatgcttacaattggtatacagcacggctgtggagacatgttgagaagctctgggatgagacacctaaattcaaatcccagctcacacttctgtgtgaacttatgcaaaaattttaacctttttgattctcagttcccctcatctgtagaatggttatccccattatgggttatccccagagttgttgaaagttaaaagtgatcatgcttgttcagtgtttagcccagtgtttggcatagagaaaaaaatgcaataaatggcatcttataatgcaattgttactgattttatcttaacataatgctctttacatttggcccaccaaataagatcatcttttggaaccattttttactgccagtgagaaccatttggtcagaatgatccacactctcatctagttgcttttaacttcacttatgagagagctgactagggataggggtaaactgagggtgacaaaagactattttcctgtgttctaagtctgctgggctatattaaatctgatcttttggtctcatcaggacaatcctttaaccaggaaaggtgggggcctgggaagactacagcttgctagagcaagtcatccttgacatgttgaactttcaacaagtttatcactcagatatatttgggggatagggaatctgagaaaaccctagattaaaagtattttatcagcgcaaaacagtgattattctaagacaattatatgacagcataaaagtattgatatttaaatatctcaataccccaatggcacccgaacgaaaaccctgcaaccagtacaataatagcattattatacatttttgcttcactttgtgggactttaaatttaatgccagaaccaacagcttacaaactgctgtggacaagcagtgacccccttgtgagctcggtaaatgttatctattgtattctaccaatatctcagcaaaaagacagagtgttcctgaaacagtctctaaagtcgtccatcagagctttgaagaagaacactgtcttcttttcatgtgggctgattttaagggacaatagaggtttaacagaggacaacacaattggattgagataaaactgctatattcccaagaattctcccataaaggtaaattccacagataagacatttacttttttctttttacattttttggttttaatttttaaagttgctttttcttgcaactagaagctcaagtaccattgctattcagtgttggtttcagatagtgctagaggtggcaaaaataattctgcaaatgcgactcacagtgtgcacattatatgtaatctgttttcatgtattcattagcagagacatttggaataccttgttgctgaataatgaaataaattgcatttgtccaatatcgtcccatctatatcacatttattccagacttgagcctacaccaatgttattcaacagccaactctgtctcattcataatggatttttctccaaatggatctgtttcatgttaaaattagtgataaagttagtttttaatggaataggcagcaggcaacagcagcttccgaaagtataacctaatggggataacttaattattagccatatcaccctcagagaaccaggattatattaaaactcaatttggtacaaacatatatagataccacccctgttttttctttaaattagctaattatgatgtggcctgaattgataaagtcaacacatcctctcaaagaaccacttaaacacttaaggaaaatgaatagtccttggatgcaaggccaggtatttgacggatttatgaatgtcactcacctcctggcttgaacagaagtgaattctgatacaagtttcttgcccacctacactcttgatgctggtaaactgttaattaagcatttcggtaatataatgcaaagttaataacagagacctataattaacatacactcatatgtgcactctaaaaatagggtatcaaggaaagtcttcctattaggtgatgtgatcaagattaattggttaatgtctatatagcccacctatacataaataagcttatgattattataattatggagagcagagttcaaaatccacttcaagttcaaagaatagtattttatacatctaagtatagacgcaaatatttaactctgtaaaaatacttattttaatgctattccaaatgtttaataagtattactcatcactcaagttttcctttttcttagtaaaaaatcatagatgtttcaaaaaataattcccttttgccgttaataacattttaatgttattttaattttttttgaaaacttggtcataggcagggaagagggaaagtttggtgttaatgcagaaactgccttgttaattaatcacagtgcatactggtggatggataagcagaaggtgatttaaatttactgaaagctaggtttatatgaaaaatagagcaataaagttggcttcccaataaagttgggttcctagcctccaagtcttacacattacttgaggttggggagatgactagatgaatacatggtagcaacttataaagatcataataacagaatataccaaaccagatttcttttagggaattcgggaagattatttgtcatttgatttgggccacagagaatgaatatcgcacttccctaggcagtgaaagttgcgatgggagtgaagaaaagccaaggagaggtcccagcatgaacatgcgtgatgtgttcaaagagaggctcactgtgtctcaagggcagggtagagtggagcaaatggctcaatataaggatggaaagtgggtagccaggttggcgggacctaatcctaaagggccttgaatactctgttaaggagtttggacttattttctaggtgacttaagccttcagaacagaaaggagtctgtttagattacgtgtgagagctcatctgtccaatgttcaaccacacaatctcaataatgataaagatactaacaaagatgaactagccaaaaccattaatctgcttccataacgagctagcctatgagtttttaaaatatgtttctagccattaataaccagggaatttcacattaaagttcagatttatagattctcttaaaaaaaaaaaaaagacctggtgatgacagaccagttattccaaacggcgacagagccaagggaggtgctccctttccaaagcatatgtgccgtccagcggtccaagtgcctcctctacctgccacactcacaccacctgcctaggggcactaaatgtttgggtttgcaccttttcttttagagagatgccctcttttattatcattattattattattattattatttttttttttctgagactgagtcttggtctgttacccaggctggcgtgcagtggtgtgatctcagctcatgcaacctccatctcccaggttcaagtgattctcctgcctcagcctcccgaatagctgggactacaggcatgcaccaccacacccaactaatttttgtatttttagtggagacagggttttaccatgttggccaggctggtctggaactcttggccttaagtgatccgcctgccttggcctctcaaagtgcagggattacaggtgtgagccaccaggcccagccgataccctcttttattagcaagaataattctaccattgcatgagttcatacatactgattatctccggcttcttttggtaatgcattactttccctttttttctttctcatgccaataaagttttccatttattcctttacttaaaattgaagttatacggtgttaaataaaatgtgtttgggttgaaaatgaaaatgaagatgtcatatgtaaggggcctatgatgaacagaaggtagaaagcatgctctgtggcagggtttctcagccttggcactactgacattttgtgtgagataattctttgttgtggctagatgctaatagcactctcgaattgtattaatcaaaaaatctctctagacactgataaatgttccctgggggtcaaaagtgcccccagttgagaaccactgttttatggagagaatggtttccaggaaaataagctctggataggacagtggtgctctgctggaaaatggataggacaatgcttatgtctcctgctgttacctctgcccctgtgcacctttctgttctgccagagacaagggttgccccacccacagaaaggtggaacagccaggcatcctgagggtagtgatgccaaaagaagcccaaagtcctctcctacctgggagaaacttcagcacctccatgaggcagcatggcagtgaaggctttctctgctctctactgctgatgtagttaagggaaacaagaaagaaatttgcatgatctattctcaagacccaaacctccctgtttgcataccccggctcagtgtggtgtcagaatgattctaaggaaggaagaagccccttttctctgacaaggcactggggaagtctagtcgagatctcactggggaaagcaggacttgctgctgctatgggaggcaggaagcaggccaggcacagatcctggaacacatcagaccaaagtccaggacctcctctcctttggctcgaagggccttgacccagagctcactcacctgagagcttctttcacttttcttgtaatatacatttatcttgaatctaagcactgttgttgtattatcaaactgtcaggatggttttatatgttttcctagtacaagtaaaaaagattagttgctttgcaaggacggaacagggagttgttgatgacaaagtgaagtaggtaaaagttgactgaatagttttgatatttttcatatggatttcagtttagatggttttgcgctaaaaaaaaaaaaaaaaaaactcaatattatggcatttcctggagtttaaaatacgctgacaatacaatttacaaaaggcctttttgtggttagtgtcttttcacacctctatcttctggcatttagaatctaatcatttctttgtggtaagaggtattatatatagaaaattggttgaattaaattaatcaacgaaagtgccttgttcattttgcactccttctcaaaagaaaccactgaggtgggaggactgcttgaacctaagagttcgagactagcctaggccacatggagagactccatctctttaaaaaattaaaaaaaaaaaaaaaaaaaaagccatgtgtggtgtcacatgcctgtagccccagctactggcgaggctgaggcagaaggatcacttgagcctaggagttccaggttacagtgagctatgatggcaacactgcactccagcctgtgagaccctgtctctttaaaaagaaaaagaaaagaaaaaacccaaaggattcatttttacaaaattcaagtcttctgaatgatgcttagtaaatatgtagtagatgctcaatacaggctagctaatgacaacagtgattttggtcctcaccataaaggggcggaagggtggtggttaaaagggggaaacagggcaacagcaaagaaaaatgacaattagtctcctcattcagtaaataatgagtaaatgaaatagcagtcactcccttacagtaacgacagctcaaaagggtgaatggcttgaacaggggaggatgaacaatacaagggtaaaagagggatgcagacaaggaaggttttgagtaagttaaacctactggcgacaaagaacgtacagagagcagggccaagcagctgaagcattcttttattcacaaatcaatggaagctattcaagccaatatggtttgatttagcagatattaactgcagctaaagtgatgcaaatacgtcagcaaaaggagagcaagataaacatgagaaacccacactcgttaaaaaggaagatgagaacagagactgacatttaaagatcagattaaaaggataggaaaaacgagagaaaagtaagacaatgtgagcgtgagatccttcgacagaagggaggtgaaggggacagatccaacaatccccctgcttatttgactccgagacaagagagaagatagccgatcacgggccatcagtaacacaaacacagcccgggcacttcataaatatttgttgagtaactaaatgtgcatgaaaaatgccttcctttctggatgtgaagataaactgagattttatatggtaccgtattaacaagtttttgtcttcaggagaatgcttaaaaccatggacagtattatttttgttttgtgtgggtgtatgtgtttgtttttcagacgaggtcttgctctgtcacccaggctggagggtagtggtatgatcacagctcactgcagacttgacttccccagcctcgggttatcctcctacctcagtctcctgagtagctgggactataatgcgtgccaccatacccagtttattattattattatcatcattattttgtgttttttgtagagacagtgtttcaccatgttgcccatgatggtcttgaactcctgggcttaggaaatctgcccaccttggcctcccaaagtgctgcgattacaggtgtgagctactgcgcctggcccatggacagttttaatgatgattttaaaacagctattcatttggataaatttccatgagcctcatcttgtacccctgacacaggtgccgtcatagattcaattagagggtcacagtacagtagttggagcactagactgagagtcaagagactaaggttccaaaattggctttgctgctaagtgtgtgatgctgggcagccacttaacctttccgagtttctgttttctctggggtaacaggagtggcttggaccaggtaactctcaggcctctctcatgatcctacatgtgcaataaagtacattaccatattaatcggctattttgccctgtctgtatcctgccttgtatgcccagtgttgaatggcagataaaagttctttttttttctctcctcattttgcctgctagtggcttgtcaacagtagtttctataatcaattctggaaatgtttacccatctgtattatctgaaggctgttatttactgttcttgctattttttttttcccggggagtgtagtaatttcgatgtgcctcccacaggagaccacagcaaacaacaaggatacattttcacaatactcagcatgaagggacactgttttgctgatgtccctgacacagtttgaattcatcgtaatggtatatttgaagtggtttcctgtgtttttgtgtgtgtgtgtgtgcctgtaaagactaaattaaagctccagtgcatatgagtcctactgtgtgctgttactcttaactagaattagttttttctcttttctgtgaaaacacaaataattgtgcaggccaattaaaccttttgatagaaatgaatagcctagtttttaaaagagttaaagaggcctaagacatcacttacagcactttttggtatcataatattacatctgagctctctgtggcagtcttagatgaagcatgaactatggaaagatcatgaagaggcatgaggggtccctgattttagtccctgccactaacttatcctggcatggtgtttaatctcccaaccacccgattataaagttagcagattgcactagatgactgctaaggtctcttgcaggtctaatagtctataaaatgcccagctagctatgggactgttgtatttagctatgtcaccttctacgatgaaaattttctttcctgctgggaagttatcaaaattcactttttagaatgttaggccaacacataaattgacctcactgcatttctgttacctcattaaaaaagtaataatccatgaaaaagtacaagatgtcagggtgatttatgtaaacagaataataccttaccttaaacacaccagaacgtactgcagagcacataggagtagctcatgaatcccagcactcccagatgaggacagggaggcctgatatctaaattccatgcatgagattccataagtctatggaaaaaatactaggtataccctcatccattgctcactagccatgctttgaatttgggagccttacaattacatagcaaagttgagtagctttaaatgtagaaagcaggtcagtgagtggctttaatgtggattcatctgttggagaagatgtggtcctgcatttcacatggccagcaaagggcaaagaggggacaatcactgagaaatgtgtatgttgggggaaagaaccccataagaaacctaccagaaaatgggcatcatccctcatatttgcaaagcctttcacaactttactaaacacttgaatgctctgggcatagtgaaccataagaaacagaggggttataacccacagggtttaataaatgcatggctattatagacaactggatcatccggcttttaccattggtagcaagaaaaaaaaaagaggggctttttagtcatactccctcctaccatttaaaaacaaatctatacataatatagataacaaaactatatttaggaagaagcgcttattgatgggccaaccacctgaaatgtattacctcatttaacaacctcaaaataatccaatgtggttgatgctgttttcatcctgggtaggagatgagagctgagtgagttaagccactggtcctgtggcaaggaagtcagatcaccactattctggatcaatttgtcaagtttcaagtgtttaccttgaatacaaaaacaacctgagaggcagctggcaacgaatacttcttcacagtttgggcatgagtcctgactaacatgtactaaattaccaagcatatctttaaataaacgtgtaccacagcaactctaattcaaacaacaatctttaatgtaataattacactggctgtgacacgagctcagccgagagtgtatttttattttaacaaggctgagtaagtacatgagtgtgggctgagctttttgctcgatagtcaatacttgaaagctggctccaacctttaatttaagcattcgcttgtagcaccaacagggctacagggtttctagtatcaaagacacaatcctccgtcctttcatggccctacttctgtaagcagcatgattgaaccgcggcaccacagaaacttgttttccctccttctggcagcgttaagccaaaacactactgccccattcatcttagcgacatcataatgaagtccctgaatcaatttatatcaagcaaagtgcagaaatccattgaagactcgtggcggatgcctttcatacatctctcaacaccatacaagaggcagagcggccgcacagaaacccaaatcataacacagaagagacctttgccgcatccaaaaagcttttttatctcttgaaataattaagggaaaggaagatactgagaatatctgattgtttctcgtgtttcttcatgtgccttaaaaatatctggcagcctccctccgtggcctcccggcaccttcagtagaaagaacaactcccgtagaatgagggtgagagcctgtcatagttcagaccccaccggtctcctctacatgccttgtctcctgcagtccccgacttgccttgctcactgtctagctttcaaggattttcacaaactaccatttgttggcaataaccttcctttgcttcaaagctcagctaagccttcacttcttccaaaaagctgttcctaacccctcagtctgatttgtgctcctcctctgtgctcctatcgtctcctgcattcctctgctctagcatttacactatgtcatgattttatttccaccttgggccctccctggcctgtgagctccttgaaggcagggaccacttcttttcatctttctggttccagcactttttatagtgcctggcacacatcagatgctcaatccatttctatgtgtattttgtctacttccattctactgcagtgttcagaaaaagcccctaacctcaatttgcatgatgacctaatctcggaatctggaacaatgtgagtttctgagactccggtggtgctggggctgttgggtcagaacagagcagggttagcccagccctgcgagtctggcagactcagcccccaattggagctatgtgctagccctgtgatcctagacaggttgctctgcgtctctgagtctccgcttcctcctctgtaaaaaggaggatgaaaggctaatgtaagtattaaatgtggtaatccatttcatggtgcttggcacacaggaagcgctttataaatgataggcttagaacatatattactggttacaaatagcagggcttggaaaatgcagaattagaagcctcttatgttatatgatgagaaatttcatgcaagttcttcttccatcagcccccatctgaccagaccacataactcatatgcttgggcactggcaaaggcccctgttaaaatgcaatgtgtaccggctaaggctggatgaactcattaccctaacttcaaacttgaatacgtgatgtgtaccatttaccacgtgtacaagaggatgagaggatggggatgttaataacaacacttcttcagtgcctgccatatgctaagtgcttgtcacatgtgagacattgcattaagtaccttccatgtgttacttccttcttcccaaaaatccctatgaggtagatgttattatcatctttatttgatagatgataaaactgaggtttagtgaggttacatgacttgcccaagatccatcagctaatacgtggcatttctgggacttaagccttatatttggaaaaatttccagatccatgcttgctcttatgcctatgccaactttctgagagtctttcttatttctgtatcttgtgtcacccggaagagccaggagagaacgggacagaagatcaaactactgagtcaggggcaggagaagaagaggaggtctggagattgtactactcgattttttatgtggtgattaggcaactctgccttcagctaaaccagaaggccaccgagagccctaagagaggagatgataaagtttgaaaacatagctccgtttgtctaatgccagccttaacctagggccagaaccttcagcaaagagctagaatgtacacagacagtattaagtcttagaagaccttcctattcctatagcaacgtcaccacatcgtctgattcactttttccttcccatttgactagcaggtcattcaaaagccaatggctataaagcaagaaaacaatcctgtaaaggctgatacttggccttcatgatacggagttacagctttgtacgtgtacttgaagtataaatgccttcagtttccctactgtaaggtcataggtccagtttacctctgtgaagtggtggtacaaaggaactgagaataaacaaaatgtttagtaaatgacagagtggaaaattccaaagtcgagtctagagaatattttcagtactgagagtatatgatttacaaaaaaaaaattactggaatcctcctgccctttggtaagctttttattgaagtgcaacatgcaaagagaaacagacacaaatgataaatgtaagctttatgaattttcacaggcaatactcccagatcaagaaaaaaaaatgtccctttggttttttaaaatagttttccatgcctgggtcaaaatcaccgaataatgcaaaacttagcttataaaatttattgtttaaagttcagttagccagaaaatgctaaaagtttaataaaatacaatgcctaaacatgagccattttattttacttcaaagagaataattatcttacacttctgtttcccaaattggaaagttagaagttttgttttctttttaaccacgaatgggcatgtagttatttctctcaccctttaaacggccagggtttcctcagctgcaccttcccaacaccctctccaagaacagagcgtggcttgccttgctttccttcctcttcactcccatccttcccccacatcaccactgtgagttgttctgaaatggggccatctcattctcctcagccctcctaattttgggtagatccatagaagacaggaggtgctttttctcatgggcagcgtggctgtgggccattgcacaacctctgtttatacagtgagtatgcttcagcctatccctttaactggctaataaaactatgctgggagcaacgtatcccagtgttctgagactgatttggctctgggggcaccaacttctctcttagttataacagtcagaagcaagaccctggaaatgcagaatgtgccaaaacacatttgctcccactcaatggacagccttttgataggaaaccaaatggaatgcaagacctgaatgccccctatttgataataacaaagaggcagatggcccagccacaaagggcaatgtgaatgtctatatgttagatgccaacaaagtgattataaaattaaggacaagtatttgggcattgctttctaactgcatgttatttttcacaagaaatttcagggaaggttgggctttcacatatttaattagtgtaatggaactgattctgccaagtgtatctgttagtcgagggcttagcctccttgtcacactcaggtgctgacagctatctgggcagaactcttcccccttggagaaggtctgagggggagtgaatggtgtatgtgttaaggtgcccatcacttgcatggtcgcaggcctgcaagggctttccatctctacacacagtgataaaattctccaaggtgcctacattcatgacaaaagtttcacatctttcaggagctgggatagctctggaagtggtactaattgtataaaagctttttcctccacaccagcccaaaacaaaaagaaaaacagccatcatttactagtactatttttgctaatataggttgcagatgattaaagataaactgtaaagcctctgtaaaccacaaattttatgcccaggtctttgctatattaataaaaaaaacaaaaacaaaaatctctgaaaatagaatatcaccaaagattctggtcttccactgttatgaaagatgaagacattataaagaaaacgaggattacaaaatttgctcttgaattcatgtttgaaagtgctttctttaatataatttatagctcatctgataaatctgtctgaatttaaagccccttctattgttaccttgtgctttgtcatacaattttcagactatgtctcctacagtaaattgtagagcaagagctctcaaactttttggtctctgtatacttttatgcttctaaaaactgcaaagaggcctggtgtggtggctcacgcctgtaatcccagtactttgggagtctgagacaggcggatcacctgaggtcaggagttcgagaccagcctggccaacatggtaaaaccctgtctctactaaaaatacaaaaattagccgggtgtggtggtgcgtgtctgtaatgtcagctactcgggaggctgaggcaggagaatcacttgaacctgggaggtggaggttgcagcaagccgagatcgcgccactgtactccagcctgggtgacagagtgagactctgtttccaaaaaaaaaaaaaaaaaagctgcaaacagcttttgtttttgtaggttatacatcagtcattgccatattagaagttaaaactgggaacatttacacaatttacttataattcaacttaaaataatagtaataaacacattgcatattaacatataaaaataagtatattttataagacaaaaagttagcatgaagaataccattattttacatttttgtgaatctttttatatctggctattaaaagaagacaagtagattctcatagctgcttctgcattcaatctgttgtgttatgctcttatggttgatgtatgtgaagaaaatctggcctcacaaagatatgtagctagaaaaaggagaggtattataatagccttttcagataattttggatattcttctgtggtactacactaaaactcaacaagtggtagtttcttaaagattagttagaatatggaacctgaagccatatcactgactttttgtactttgttaaattaaaatacaccggtatattttgcactttgagtggatcatttacctacatatatttttataatatcatccatgggtcacttggaaactactggttcactgggttttgtatatcttccagattttgacacatttcattattagatgtggttatatcaaggaattatgttgattaatatcactacccataccatcagaaaagtttttaagtattgggaagctgtcagattcctggggttggatacaagttttccaaaattcagatttttgcctgaatgtatgggcagtaaatactgtgaactgtttttcaggagataacagactcaaagttcatttttgagaaaatatatgaaacatatccacatctgaataattatagtctgttattctattaagtggcattccattcaaaaaacagctagttcagctcttaactcaaacaatgacacaagtacttttccctggagacaaacatggtacttagtagtataaagcagaagtgctttatgcaaacttccaattttgtcataaagaacattaaaaaggtatggacttgagggtcaaaatttaataaagttaataaatttttctgcttcatcaagcacattcttaaatgaaacttttttttttttttttgagacagagtctcgctctgttgcccaggctggagttaagtggcacaatctcggctcactgcaagctccacctcccaggttcaagccattctcctgcctcagcctcctgagtagctgggactacaggcgcccgccaccatgcccagctaattttttgtattttcagtagggatggggtttcaccatgttagccaagatggtctcgatctcctgatcttgtgatcgatccgcctgcctcggcctctcaaagtgctgggattacaggtgtgagccaccgcgcccggttttttttttttttttttttttaacagcaactgcacagtaatgaagaataccatgactgctggtacagcttggcattaccgtcctgcttcctgctaaggtgccagcagttttacccaccaatgctttgcaccattaatacaaatggtcaccgtagtaaaaaggggaaacaatgcctcagtattgttatggaactggtttttatctcttggagcttctgagagggccttggggccccgcagggggtccctggatcacacattgaagaccactactgtagaggatagtatctataaatccaaacgctctctaatctgctaaatgcttatgtccttgtggggttcacgtaaagaagatttaaaaggtttatttctgtctccactctcctgcccttcctgcttaaaaaaaaaaattccattgtggtagttcaacataaactgtgtgtatagaacaaagaaattacagtactgttgatttcatcagcattttctcctaacaaagaaaactagctattctaacatgctattgagaaaactattgaactaccatgagttataggaaatatgacatgctcagtgccccctccatctcacctaagtcccaactctttcccaaacctttcactttgggggtattttggatgagctcttagtagtgtcctcagaaataattggttgtcctaattcagccccatgcaaattaatgctcccctaaagaggccttattataattttcaacccttgatgtctacataatcccctatagttctttaacttcttgctttctaacttctgtttaccgatgcactacttttgtcagctcagtatagcatcaattagtaacacagttgtgtttattaggtctccctagagccttgagaaagctgctttgtatttattaatgactacacagagcactactatttttcaatagcacttaaaaatgagtaaattactgaagatgaactataaaagaactttaaatttcaaaggcaagcaaaaaaaaaagcacattatttaaaaccactcataatacttgcatggttaattttattttcaatgtaatatcaagagagagggaagaaagtcaaacccagactcttcttcctgttctacttttggcattttggagtacacatgatttgagttagagaactgaagcatagatctggtgattaattaagagctggtttaacaggtctaaatttcattatgtcacacacctgttaagtaatgcacacctgattcagcagacatccacccacaaggttaatctcaaaaaattaagcaatcaacaggaaagaaaaaagaggcatactgcactaacttaggtccagttttatgttctcaagcataattccaatccaccaatttgaaatgtatccactttgttttctcttattttgtgaataattccctgtactacattaggtgaagttagagttgcccacactggtatagaattcactactcaaggaaaccagagagaccaatcgctcctgtgatgaatctttccgaaccaaacttaaagtgatgccagcaattatggcgttcatttgccctgcttttatattcctggtcatttatgaaatgaagacgctgatctgcaaaaatcactatgcattcatgaaaggagctctgggagctccccctgaggatctggctatgaggcagaaacatacctcagtgcacttcctttgtcttgtgctccctctttgatgtgcaagtcactggtggagtaagctgtgatcgctttgatgttgaacttctagactttattgttactagcatgcctacaaagagagctgtcagtcatttcttacatctgaacaaccatgtttctttacagcgcctcttttacaagcatcaatccttaaatacatgttttcacattcctgctgattaccacactatctttgttgggggagggctgtgctcaaatataactacagcacccacattttctgtaaacaccctgaggcatcttcagatggctggtaaccaaccttcttcaacaagagaagccccagtgcaaaacatatttctagcaaacgaaaacattctgaaaacactcgatccatcttaacagtcgaaatgagcagtttagccaatatttcccctaagcagccactgaaattgcatagaaacttccaggccacttcaaaagggattctgaacgtaacagcagcagggggcttagaaagactgccaaaaccctgagacatcttaactcatcttaaacaactttgtttctctgcaatagtggaaacaaaatgcttctgttttacgagattttgcttgtggtagaaacattgcttttgaaatggatttctatcaaaccaattgttttgttaaacaatatcattttcaaaagttgcttgatgttacggatgcaacttaagaggaggaggatttttcataatcttgtgtctagggcaaacgtggctgtgaatgcaatggaggtacaatttcttagatatatacaaaataggcggtatgcaaatctttaaagatctctgttgaaaaagatatggctctaatttcatttaccagctcccatcagattttcttttcaaactcctttatcgcttctgaaactgctgaatattatcaaaccccactgggaaattccacacaaggaaataaacttaaggtgcttacatcacaccatgctggtttataatgaactgctgtctttttgaataaatgtttcaatgaaatccaagtttttaaagatgccaggtctcaaattaggaagttaaatgatattttttcatgctggagcttagttctgtttttcttttttataaaataagatggcatcacaagagatacattgtttctgcttgctaataaactgcagacgatacattgggagagactcaatttctttgggttcctggcttggaatatttggtaaagaataaaattactgtggtacgcaatggttaaggctactccatggtttccatttttaaacaactgcccccgccccttggttttaaatcaaccatcaaaaacggaaaaagctttaggctacaatttgataaataaggtatgactgtaatttactagaactaaatctgggcatatttattattaatattaatgaaaacttgcttgttcttaaatttatttaaatagcataaagtaattacctctttctgtcttaaattttcacttccaaaaggaactgattagctgatagaaggacctatagcaattaagggtagagacagggaataaggaaagtaggaggcatttgtttgcctctcccaagtctcaaacaagaaactagagcatgtttctgttttaatagaaacactttcatagaacggtagagatggaaaagatcttggtgactaccaagtccaaccctttaactttaaaaacagggaaagtgaacaactgaggtttaacctgacaattattgcatcgcagatctgggacaataacccatatcttcatcttcccccaccctatgtaggggggtttccactactcaacattgttttgctacactgcggacagggtgactcatgtacaaagtgagggtgttgggcttcagaggtttctcaaccagaattatctgagttatctttaaaaatgtagcaatacttgagctctacaccttgggaccagtaaaatcagaaatctgtaagagcacagcctgggcttatatatcttttaaaaactctttagatagattaatacgcagaccaggttgggagcagatgacctgtgaggtctattgcaaaatgttcaccatcagttgggaaaattttttgattcagttccctgatgttgacccatgaggccataagcatttctaaaccattatactgtttttacattggcctagctgttgttattatctgcatttatctagttcattgatatgtttacttaagtattacctacctctcccaccagaatgtacactcacagagaccagagactgacatgatcactgctgtcccctcggccgccagcatcacatctgccacaataatgagatagatactacaccagcattttcaaaagaaaaagggggctggtgtcgcagtgtggaagcaggcaggtagtccttctccacaccagccagaggaagtctactttcatctatcccaccagactagaatctaagctgcacgaaggcagcatttggtctcccctgtttggatgtcacctccagagcctggacactggcagatacacaccagatgctcagtgcctgagaaaggccatgtgctaaacaggaagcactgatcagcttccagggcactgaaacctttactttgtcgctgaataaagcaaccttgaaaagacatcactgtttccactgagttggccttgacttctgcagtaagactcttagcctgctcctgctaagtggtcacagtattggcaagacccagcccaggcacacagtgaaggctaaaatacattgtgtctatgtcacatgcagaggctggggcttctggacaaggctttatgacgaaaaggagtacagtatttgaaaagtctcacagcagcctccagcaccaaaacagcctcagggttctctcctgtttgggccacttggggtaagagatttgagggaacagtctgcccacttgcttctgcatgctggttgatagcaaggccaaagttaacagaaaaatatttcaagtgtgttaataacaatgccagaaattgctcacatctggcacctcttccatgctgaagggagtgaactaaagagaagtgaatggttaccttaatataatttacctttctgagattccctttcctcgtgagtaagaggaaagggttagccccgagcagtggttcccaaacctgtcttatcctcacaagaggatcttttacaaaagaagattccttggcctcccctcctaggcttttggaagcaggatctgtgcaggtgttgctggagaaaggcatttattttttaaatgcttcccagatgactgtgaagatcaatgacatttgggaaccactagaggactggaggactctgcggtccacctggctctgacaggctagaacagagagcttcacaaagtgaggcctaaggaccagttgcatcagaaacatctgagatgctgtgtaaatacatgccttcgtgggcctcaccccagactgacagaatcaaactctgtgtgagacccagggatccgccttcttaagactctctggagtatgggttctactctacagtttcagaaccactgtttcaggcaggattttagagctaacttatggcttatgtggaagcaaatcatgttcatccataagtatagggtttgactttatccagttacattaacatttcattgcattgtttggcatgtcacagaaatctcctttgttttaaatggcatgtagcttatagcaaatgcaaatgtgtaagtccaacagccataaagcagccttctctgactaagtgtggctgccaacttctcagtgcattttttaaatgctgattcatggcttaagacacttgattgggaggaaggtgtctcagctcctattataaaagcacaaaggtggtacctgaattacctagcacacaataggcacttaagtatttgctgaaacaaatttatttacttattttcacccactgttctacagaagatttgaagtgagatgaacaaataaaaagaaggagaaaaaaaacctttccaacaaccgaaaaatgaaaataacattctgtgaaaaagagaatacttctcatgtggtgaaaaaaaatcacacttctgggtggcgcagtttgtaaaacggttggcttcaataactgatctgaaacttaaccacaagtcttcacttctgaaccactgccttatttctatgatagaaaggtttaaacagcagtttttccttgctttttattttttttcttctttttcatgaaacgctgcaatttcatctttctaataggaacacgtaagcactattatcctttacaagcctggtgattatttgtcattattattaccctggttattctagctcagatcagctttgacttcttcagcaatgcaaaattcatataaacgtgcattcttatacctctgtgtagcaccaggaacaaataacatttaagcaaataggaagatctatattcattcctcagattccgacacagaaatcagattgttttaccattgtttcacacttgttataacaccaaaatccaaatccacaatccacttgtattatctatttatcctaaaaaatatgcaaatgaatgcttgtcgctacctcatgcagagtttctgacatatcctctatcttattttttaggcaaactgtatatacttaagtgaaccaaatgatctaaccataaatcttcagaaaccaaggggttaatagtttttttcatccatgtttaaaattgttttattaccccccaaaagctactgtagtttacttttttactaaatgtttatcatttttgaaaaagaaaagctctagatttaaaaaggggaaacgctgaatttagctcatcaaatgacgacctctttttaaaagatattcaagggttgggaattagaatggagtttgaaacttaaaaaaatacgaggattactaaaaatgtcataacaattgttgactcacaaaccaaatttcacttaaatttaatattgagccaaacagcaaataaatcagctttaagttaaaaattttttttcctttacttcctgccaagcaaacttttaaaattcagtatcccttccacagttacatttctgataaccatgaagaacaacgagttaaacttttgaatctggaatagaaatgtctcattccaattaagaaaataactacaacctttgaccttcccactagcctgatgggaaattcactggcaccattatgggtttagccgtccatgtgcaagtaaccactagagggcagccttatctcatatctgacatgcggcagaaaaatacctgaaatgcttctaatgttcctttaattatttttgtagtatctttgattttcctggatacttaataatcaacttcaaatggaactaaaagtattcctaaacagttcaaaagtccactttcacaaacaatgatatcacaaagactggtggtgagaggtgctagagatacagctagctgatgttatctttaaaattttaaaacaaaagtttttcatctttaagtcatggctgcctctttactatgtgctgggttaagtgccaagtcaattatatcacaactggcacttggggtccatctttggcattaaaatttcaagtggttctaggcaaactgaagtgtgtttgaggaagaaactgaccaagattgtgggaaggcagaaccacacttacagcaaaaaggactggagagggacagcagatattacgtattagaggggtgtgtgtgtgtgtgtgcgtgtgcatgtgtgtgttacagtactagtcttcaaatgacttacagtctttcatttgaaagatggattaaatgtgttctgcacagccccaaaggaaaggatcagaattaagggattaaaagtacaaaggagagagttatgcttgatataaaaagacttttctaattcaagatggagtaacctacctttaaagatagtgagttccccatcgttggaggtgttccagcataaccagataactacttggcagaaatattgtgggcagggtccaaatcccagtgagacattcatctgagtgactttaaaggtttcgtctgagactgaaataatccttatttgctttcagacaaacacaccttaatccagcagtcattaaggccattccccactaagtgagaaatgagatttttcagatctacttgaaaacttttagacttcacgtgattttctaaaagacaaacgatttctcaagaatagatctacaatcatgcccctaagctgtcatgaaaacaaacacgacagcactcacaagcacgagaattcgtaagctttatactacacaaagtcatattaaaattagaagatgcatttgtgaatgttccctttgcctaaggataagtggaacatatagatatatctctcaattctatcataatggcgattggttacacaggttagctgtacttcatggtattctgtattcttggggaaaataatgcttatatttcactcatatcctcttaaaacaagcagacttaatgaaaatcatggttgaagagagctaatgataagcaaataagaataaccccatttgtaccaaactgattttattaaatagtaatttaaagatattaggctcagcaaagcattacataattggatctatttttttcccatataaatgccagagttataatttccactaactagagacaaagttatatccaggacgtttttcacagcttcctccaggggaggcatgaagatagaaattagggttgtagttcttgtttcacgttatcagatggaaaagctaggctataacgcaacctctgtgagcctcagtttcttcatcagtcactgatgggactatcagtgactctctatggaggattaaatgatgtaagagtgtttgtaaaccataaagcacaaaataaatatagattagcatcatctccctatttgtttatgaaatgcctagtaaacttcagaagcagtaacattttaaaaaatgaaataactggaaaacctagggaataatcttgacattattttttatacccacaggagcaaagatttttaaagttatcgtattatctcctgaaaatatgatgagggctaacaaatttcattccaaaaagaaaatccagaaacaaaagatttcagctgcttccttgcattttgcccattggatagtatatgctattatccatctatttagacctcctatctcttgacaattaacagaaaaatcatgttctatcatgtcacacaaaatactgacggatagaaaaagctctgactacgactctctcagttcatgaatcaaaaggttgggatggaagggagttatcttcagtagaatagctagatgggggagacagaacttgtaaatcattcctcagagggtctgtatgtggtctttgagatactatcaaatgtcaattcacacctgacttgtcactggtggatggctccaaaaaaactgttttttaagtagagaaacataaaagtggtgtagctgctgactctgagtgtctaattatggctttaaaattattaaatatgaaatacataaaggcagccttgatttcttactaataagtgctgtaaatagtaaaaatgaatgcagaaaacatttccatgacagagtattcttaggaaatttgttccacataaggggttttgttgatccctataataatttaagagatttttaagaaaactgaaccctacatctacctctgcaaatctattcatccatccatccatccatccatccatccatccagtaacttttctccagtaagtggccatttataaatattattttcctagataccccagagcaaataagaaagtggttgggtgctattgtaggtgctttgcaattatcaccttgctgatctcatccacttttattgtgtctcacttgagtgggagggaaagataggagaaaaaggagactaatgagaattattaatatatttacaagtgtatctactacatattaaagagctaaggtttagatgacatactgtatatttctaaatgactatttctgtttagaaattacattatttcatgactgggcagcattaaataaattatatggttctcaattcaaatcgtgggcaaaagggtttacttgtgcatgctgctgctttgtatctcaagtaacgtgattgaaatatataaaatcaagaggctgcccatgaaaatggtgcttttaaaatactctctacttcatggagggtccaggcttctccctcctcccatggacaaatggattcagaaatcctctttgtctttaaaagaactgatcccttcttgccagataagcattctgctcagtagtggcaaccatttgggttttctcttttcaagatccagccatcaccttctcccaatccttcccatcacaagtaacaaaaatggtacaaaaatcccagtgaagggataccaggcaatgggtccttacagtgagatcagagatcgaattctaatttcatttcgtagaaagaaaggccaagttcttcaaaactacagaatcgtatttattacagttggacatactaccaacacatacagtattttcaaagtggtgaggagtcttgcatttgcacatgaatcaggccggacgaagaatctacgggccagaaattccctttaagcctccctgtgctcttataactccatttgcacaaacacaggctgagcactcatatgaagcaaaggggtatatcatctactgaaactgatgaacgtcttacatttcctttcagtactccgctgccgcgtgacatctggccaatgcacttttatgatgagcagaacaagtgctcccccgattataaatgttatagctggctctctccctttgcccaagaagcaatccaaatggtattggaattttgttgttaattaaacaaaagcaaaattgaaggatgagactagagttactcaaatgaagatttattacatttgagcatgaaactaagcctaaacttatttgacaactaatgcagaggaaggattttcttctttggtgagttcaaagggcctgatttactgatgtttaaaaaacatcagtaaatcagccaacaaagagaatctttcttttatggtggcttgttctctcctcccttgtccacatgcatccacataccaaaaagctatattgtaaacagtatttctgttttgcacgaaaaatctagttatacaaactgtcttacacatggaaccaatttaactattaaaactgagaagcaatagggaagtatttaataagattctaagccagttttttcctctaaatctgatatggaaacatttacagcattcctcacttccccacaaactattttctctttcagcttaagtttgcaccaaagcaagataatcccattaaaattcaggatattatgatattgggagtgaaatattctaattgttcagatgcattctctctccctcttcctctatctctctctctctctctctctctctttcaggcagctgagtttatagaaaaattgcattgccagtacttctgaggcacttttttcaaagcacaatactatgaaactattattttatggcagacagaggtcactccaagtgtgggggtagcgtgtgtgattcttattattctattagcaagggacagtatggaacttcactttgtagaattacaaaagcaaaagcctatgtactaggaaacatcaactttaaatcaaaatattaaaacgtactttccttttttttggtgggtcgttactgttcattaggggagaaagcagtttaaaatgtctcagcctctcgcctttcctccaatcaacacaaagtatattagacaaagtggataaagactggcattgacatcttccaaatagcaaaatcaattttataatttaaagacaaaaaatgctttaactgcagagggcatttaagacgtttcacacttacagggctaatgaaatgcaggactagcataaaagttttttgggggggtgggggagaatagattttttaacataagaagtcgataagaaatcttaataatttttcctcccaaataattttaagtgcttaagagcgcggatcacgggaggtttcctctcttttacttatatgaattacatattctaaaaatgattaaatcccattcccctcaagccacaggggaaaagagaaaatttgctgtgggcacattatatagaaagatttcatctcaagcagctcatcttaacgtccagtacgtttcggcctgttaataattaataaaagagatgccacccaatctctagtgaagaaaggcaaagctcggtgatccgaaagtaaacccagcgcagataccgaactggtgtccttcattccagattgcaacacaaccccaaactagcaaacgtttaacaggcgcttggcacccgcaccggtggctaggacccgcaggacagtctgggtctgcacaattgctgcgcattagggaagccgcgtccgccgcaaacagatggggctctaaatccccaagcctggcggccgggcctgcgaagcagctcgggcagattatccacggcgaggaacctgcgggcgcacaagcgggcggcgggcggcgggcggcgtgctgcgggctgagtttctccggagctgtttgcaaccgtcccaagagcgagtctcggtttctccggcagcacgggcgacttcctgaacacctccaaactttagctttcccatcagaaagttccctgacttgccacggtttctctccttctcacctgagaggacctagagccagtcctccctccaaccaaatccccctcccctcccgcccccggcccggctacggagtcctgatgagggcggaaggccgggccgcccggcaggattggccgcgactaacccgcgcccgtcggccctcaccacggtctaacctccgcccctgcccgcggatcccgtgggctgccgagttcctccccacctccatccaccagccaaagtgtcaagcggggtgcgccgcggctccctgggccgcccagagcgtcttggcacgctcgaggcgcccgtctcgctccggcccgcgcgctttcggaagtggccgcggcgggacacagcgcgggacacagcgcggacctgcggcacttgcccggccggcggccgctgaggcgctcggggacgcaggggcagggcgcaaggcctggggcgctgaccagtccccggggatgacatcgcgacaacgcgcacgcacggccctgcccggccgcggcgcctccccgacctaggccggagctgtcccgggtgcgggccctggggaccggccgcgggcgtccccggcttcctctgaactccgcagaccctccccttcctttccgaagcgcggcgactcccggcaaactttcttttgggagacccgcccggtgccaagcggacccaagagactgacaggagccggagggggcagcagagggggatccaccccgtgcgcctttgccccccaatcggaggcaggccgatcccgtggccgggctcaggtggcgccgcggcggtggcccagaaggccctggcagggcccccgcgccgagccccgggcagtacgtgcgttcgggcaggcgcgcccacccctccccctgcgcgccctcctccccgccccccggagccgccagcccacccggccccggcggggcgcccgggctcacctttcatcgctgcgatcacaaaatacatcatttaagccgcggtgcggagagcgcagggagagcggatggtccgaccccggagccccctctgccgccgccgcgccgccgccgcccgagccacagcagcagctgccgcagctgcccgcccgccgagagccatcccgagccataagaggctccatgtgaccggctgacatcacggccgccgctctgtttacaccgcgcccctccgcttcctcccggggcgggaggcgggaggcgggaggcgggaggcaggcgcgccccagcgccgcgccccgccccgcccccgcgggcaggtgagtagcagcggcggctctgctggcccaccccggccgggcctgccctcccgcgccccgggccctcgcccgggcgcccgccttcccctcgccttcgggatcacctgtggccgccggtcgcttttctgcacgcagcgccccgcggaacgcgcctctgaccactttctgcccccactcggtggggcaagaggctcgcaacccgacgccactctcccgctggcttgccggagcactcgggggcgataaatgcgccagctcgttggtggaaaagacaggtttggtctggggagctacggtcacccgcatttcctagagtgccccagctctaatcggaaggtacggcccacttctgggccgtggagaacgaagccactgggaccgtccggggagtggagtaagctcctccgaagtctttctggagagactcggcctgggcgggggaactccgcccacccaacccttggcaacccttggatattggcagttataccaataaccaaggtcctggtctacacctgtcccccccaacccccttccccgcgtccaagaccactgatacctgcaaggaaagccggaaattgtatgtgaatcacctaaatgaactccagttgccagctgatttgagccgctaaattcccaggctcttccatatctctccagagaacccatctacaagtaggaaaagctatcgttttcataccctaaaaatgaaacactgtggtaattctgacagaaaataaagacctctgaaggtgaactttgtacattttaacatgcgactaagacttaattccctctaaactttgaagcttaattcttcttactgtccttacggaactgtaaatcatgacgttattattttacaggtcaatctctttacaatgaatttcagatgctacatacccagagtctgcattgtttaaaactttggtcagggtgtctatagtaccgagcataacagaaaaaaattctgaaaagccaagtttgcgtacctattgcggttccttcacgaaatttcattctgcttgcttttctgttggtctgttgccacgcacaacttaaaatatcagatggctattagctgttgcattcatgatgattaagcaaggataattctagcatatttttttctccatgtaagtgagttgctcttgcccctgagttgggccacaatttaaaacacaagcaaataatcagcaccgtagaaaacaaggattcatacactccctccccagccccctttcaaggcaaaattgagtcttccaaacatttatacagcgctctgatttagaaggtcaataaagttcgttgtccttcagtcaagccatggctttataaaagtttgatttcagataaattcattctaatacagctttttttcttaaagatttttcccccaaaaaaaactacaaagaaaagaaattataaaaatgtgaacccaagacctacccatgttaactcagctgtccagccatagcaaagtggacaagagtttcaaatgaatcagccatacccactgtaatgtttacaattatgaaattaaatcacaccacgttcctatgatgcaactatatctcccaatgaggcaacgcccctcagttacactgacaccatcattcacatttggttattgatttcccttgtgctaacgactaatgccaagctatcctataagcaggtcccaggtacaattttctttcttttgtatcgttaaaggatggaaaaccatcggagactgcatcctcggaagtatgttcttccctactcaatgcaagtgaacccagatatacaactcggatgattcacaatgctactttaaaacagtatcctgctttagaaaacaatgttttcaaaagaaccaaatctattagctctagcgtgccttgtgagacatctgactccaaggtgaataatctgacatcactagtaatcagtatttatttccagatcatttcaaatgaaatcagtcattgggaacaacatgtaacatgacatctgctcctgcagttataagtagaatcattcattctatagatatgtccccaatagaaatataatctcaagtacttatctgaaatatttacacatttattcaacaaagacatttccagaataatgtaatactgaccttgccctttggagatgtacttcattcacttcctacaactaatgagcaacagaatttcagatatgaagtcctaaccttccaatgtagctagatgctatttgtaatacatgcctctattaaatgtcttcagcttttaacccaggttatattactgttctttatattaacacaaagctctttgagagtaaaaactataggctgttttttttttttaaccactcaaaatgcacattttctatgacattataaggccccaaccaaacaaatcagtcaggagtaaaagggaacatctcccatattgaagggacatctcccttcaataataccaaattggagccataaatgatacattttagcacaaacttttacccactgtatattaaaatacaatcatgtaaaagccgggcatggtggctcatgcctgtaatcccagcactttgagaggtcaaggcgggtggatcacttgaggtcaggagttcaagaccaacctgggcaacatggtgaaaccccatctctacaaaaatacaaaaattagccaggcgtggtggtgcttgcctgtaatcccagctactactcgcgaggctgaggcataagaattacttgaacccaggaagttgaggttgcagtgagctgagatcacaccactgcactccagcctgggcgacagagcaataatctgtctcaaggaaaaaaaaaaatacaatcaagtagaaatacaataaaatattaaaatgcaataaatatgtaggaataatcgtttggattttattaaataaatgcttatgagtaccgactgagggagaacacagtgctaaggaacatattctttctttttctttttaccaagtgttctgaaaaaaaaaaaaaagtaaagtaatattgcttacatgaagataattaaacagaatgggacttctttaccaggaatgggagtttgttatatattaatttgcagctcaaaggtttctgttgactaatctcagaaaaagaaggcacacaacatacttataaacacatgtaactcatctcagagtctcccaggatggtcacagccccacgtggtgttcctgtgtgctgggttccacactgagtctgccacacagtaagaaagtagagagacacttctaatgccaagttgttcccaaaaacacctaggggaaaagatgggtgcatttttgcaggagtctagacggtagtatcactagtaaattggtgccagtcttcctatgttacagtttaaataaatgatacttgactttatgagcgtatattttgtttttcaccacacaagttctgatctcataatttgccaccccaaatcacagatataatgctattggggagaatgacaaaccagtggactggcaaacttatcccgaatctgcaagtggctcctaggacaaaggtgatttcaaagtttgctgatgcatgtgaggcacagcattttggttttgtctcacccaggccctgcgtctctctctccagtgtgcgtctgcttgctaattcaattaattttgttatagctgaacaagaaagggatcagtgaaaggttaatgtggtcctaggcagcttgattcaatggaatccttagccaccactgcactgtgacctttaggagttgagccattctggttgacatagagccaggggaccaagtttcctataaacacaatagggtcagacccagagagttctaaagcaaggatacttgggaagctatggacacatcacaaactaacctagaagagatcacagccttgcttaaatatgagtccagaaggagccagtttctcataaaggaacacttacaaatggagtaacactggtgagacccagaagccaacagtaagacaaggaactctgctgtttatgagtataaagggggacgggacaagtggattaatgtggtttatctgccttattcatgattttaaaatgaatatagatgtagattgaaatatgcatgtatgtatacatatgcatagttcatgaaatatcgtgaaatagactacatttgggtggcaagagacacctacacttttacacactcacacccacccacacacacatacacatatttctcataatcagccacacttactgagtaggtattatgctgacactgtgatggataatcaaacaagaataagacagtagccctgattttgagaaggtcacaaatcagctgacctgtgctctgaaaactgtagagttccgtgagtcggtccaaacattcctaaaggtgtaacatgtctggttgcccattgaaaagatgtttgcgcagcactgtgccactcactaacagttgatagatgactgcaaatcattagtgtggctattagtgtaatgggatgttggaggtgaaagatttgactaaatggagacaatggtgcagggcttctgggatttctggaaccatatatttcatacacctattaggaaattcagaggactggcttatgttttgtaatcaccacaataaggaaaagggtaaagttcacaggcatacagagctgagcaacctccacagaataggtgggtggcaggtgcctcactacacacacaccagtcaaggcaggaaggggagaaatgcaaaccaaggccaagagggacctccattcctttatgtccccatgctgtgtcctcaccccattcctatacctggcagtggtacaggagatacacacacacacacacacacacacacacacacacacaacatatatatatatatatatatatacacatatatatatatatatacacatatatatatatatatatatacatacatatatatacatatatatatatatatgtaagcaaacacaagaaatacaagtgaactcagaatctggaatcctgggtccaggatagtttcacacttgtcattagctttctacatcacatcgggcaagccattttacctttcaggacaccaggcccctcaactgtagcctgatggagtaggaactgactgcaacgggcccctaccactcgaacatcctgtgactgctttcagaatcattccccatccacttttcgggaacactttcttccctttctctatgctgtgccgtatctgcttacttctccaagaagccttctttgtttgcttgaactccatggtatggtggaatgggctttggcattagatgaagttgggctcaaaaccaacctacatcccactcactagctgtatgagcttgagcaaacctttgtttcaccatacgtcaaataaggagagtagagccttgtagggccactaggaggattaaacagtatacagaaaggaaaaagtgatatctctcagtagagcttacaagtggaactgccatcaccaccccatcagcccttacattgttacacacacagcacctgtgcctgacataaaatgttaacccttaatcaaaatttgttgaaatgtttctccgcatgcacttttgctgagcgttctacaattttgaaactcgtgtgtgtgtgtcatgtatataaaacaagtatagttgacccttgaacaacacagatttgacatgtgtaggttcacttatgtgagaattttcttccgcttctgccacccctgagacagtaagactaacccttttttcctcctcagcctactcactgtgaagacaataaggatgaagacctttatgacaatccacttccacttaatgaatagtaagcataatttctcttccttatgattttcttcataacattttattttttctacgttactttattgtaagaatacaatatataatacatataacatacaaaatatatgttaattgattgcctattttattggcaaggcttctagtcaacagtaggctattagtagttaagttatgggggattcaaaagttatatgcagattttttactacaagggggtcagcacttttaaaccctacattgttcagggatcaactgtatttattaagcacctgctaagtattgaggacacaaagatggataagaattaaattgtccattggcctaagaggccctgtggtctagcaggctttttatgtcttatttcctataggagagaaagttctcatccaatgagcaatgactaaacaccttctgtgtgcattacactgtgctagtatgtcgagaggaaaggacaaaaatcaaggtatcagtctatcctccaaggagcttgcaatctagtaggaaaataaacgcaatgcttataatgtaaggcagaatgtgtggcacatactcgaagtgttccagaaataaagtgccatgtaagtcaagaataagagtggttactatgtgcggggttcatctgaaactttaagagaaggaggacttcatgaaggatatttgagctagaccttgaaggccaaatcacatcttggtggatagaagtaaaaatgaagagcctcttagaaggacgatagaacacagttgtaaaagtacaggctgggtgctgtggctcacgcctgtaatcccagcactttgggaggccaaggtgggcagatcacctgaggtcaggagattgagaccagcctggccaacatggcgaaaccccatctctactaaaaatacaaaaattagccagctgtggtggcaggtgcctgtaatctcagctacttgggaggctgaggcaggagaatcacttgaatccgggaggcggaggctgcagtgagctgagatcgtgtcactgcactccagcctgggcgacagagcaagactctgtcttaaaaaagtaaagaaaataaaagaacacagttgtaaaagtacgagacagaaaatgcatttctcactcaaggaaactaataacgagcatttaccagagataaaatacacacagataagaaggggagaaagcccagaatgtaggttgtagctatttcttctgccttccctcacagtgcccaggacagagctctgcaaactatacactttcagagaatgatttttgaaaaaataattggaggtagaagaagggaattgtgcttcagaaaataaatctctttgcagcttgcctatttcatagtcttattgtaaggattaatcgttggtttgatagtcataaagttaaattacacttaataaaacacatagagcaaaagagttccacatcacagcacaccaaggaagaataaaactggaaatggatgttatttcatcagagtgaaaagctaagcagagcattttaggatgaacaagataaatggaatgttatttgattttgtatctcatccatttcagttctgaaaattatctgagacagttctattaatatagatgcttcatatataggccatattttattttttaaagaactatcttaaaaatatattttcaaataatggagaaaagataagcggttacagatggttttccctatttttgtcatgcatgatcaaggactgcagagtaacgtgggcttcattgggaaatccaaatctcgcagctaggagcgttccaggagcaaatgctggcattattttgctttcacagggaaaatatgttcctgttcagtcaagcaaagtaatcaattattctgcattatgaaatactcattttataactattgacatttcagacagttgtgccacatgtcaatagtggttttgatgctcacatttaagctccagcttataggatgggattcatctgggctgacagtgtctgaccagaagtctattctctgctctcagaagtccatctattatttatgtccagtcctacactgtggaagtctgttgtgagcgctaaaacaagaatagatttgggtattttttgttttaataaaaaggttaaaattttctcaatatgttagatccacattttaaaaaatcactcttctcttaaaatctcttcctacattttgtaagatggaggtagattaaattaggcattccagtcagaagttccaaaattcctgttagatttttagtatctagtaaagccttgtgtcctcaaaaataattttgtgaaatcaaaatgggtttccaatcattatataatactgttactgttgctgctactacctctcctactggttaactattccttggaacttcctgtgtggcaagcattgattttatgctctttttaaaaatcatttcatttatggaaaaacattctgtacttttattacattcattttacagatgaggaaactggggcacagagaaattaagtgacttgtccaggaggacagggccaataaccggtggaaccataagaaaaaaatccaggtacactgattctagcatgtgcactcctaaacattatgctgcaactctcaaaaattgaattaatttttccttcaattcagcattacttagtatttcaaaaatagcaagctgacttctccagaaatcaagaagtactaccctcataacatctaggcatgtgtgcaagaaattcttttatcactggcttctataattgagcaaggttagcatgtgtcattatgaattattgcacaatgtagtaaattatttaattactactaatgaggaaacatactgtacatggttgtaattattctgttggaaaacaatgttgccatttgtacatttaagaaacacttgctacataccaaattaactcttgagggaagtttattttgtatttcggaataatcaaacaactctaaatgttgttaatggatgttagataggattacaaggaaactaaaaaatacacaaatcaaagctgacgttcctaaaagactccaaaccaaaaacatctgttaaaaaggtaaaaaaataatgatttcatagttcatgatattctacagaaaaagcacaagatatatttactgtttttacttttccaaattgtttcactgctgctcttttcacagtttttgcaacatatataatatagcagtttgttcacctactttaatcacccaacaaatggctttgatagcttaataatcttaagcagagccatttattttcaatgtactttgagtaaactgttatctacgtttattaagtgactgtagttatgcatagtcttgttatttataaaagaacacagtacatacatagccctgggatgttttgacaacacatcttaagtaaaatattagtaaaataattttcaaaatataataaaagtgagaaagagtgacttgtttgtgttagctacagtatacattattgagaaactactgatatgcattattgaatttgttgtaaagccttaagtacgtaatagtcttggaaagcccaactcgcccattatttcaaaggttaggtacatgttatatggtgaaactgactttcatagaccagaatgtaacggtgatttgatttacaacatctttgctccttgaaatataacagaggtaatgtagcaaagccattataaacagggaagaataaaaaagggaaatatcagagttcaagacactcaaagagggcatttggtaagtctctctgcttccaaggacacgaacagttaactgtctgtttctgacagttgcctatcattaaataatcatattcaagcaagataagtgatattatcatatttgctctgttgtcttgtttgttatattatcccaaggtcagctgccattaaactgggtaatccaaatcaaacaaaagttttgtcctcttatgaataatgcatatattggaatcatattatgatttgcagatttcagcacttgtcaaaaaactagtaagaaactgtttcctgtcaccatgttagatttaggcgtaacaaaacaagagaaaagaaaacatgttttatatgttcagagagatcgctgctcagtttgcagtataacataaattactacatagtggttattttacactaacagtattttatcaactagaactactgtaaaacatatagagtgctctctattttaatggtattttctgatgtcaccgtgtcaaactagaagaattgcactttgattcgtctttcagatctcagctttttaatcttattaaaatataatttacatgttggaaaactcaccctttttaggatacagttctttgagttgtgactaaggcatttaattgtttaaccacaattaaattaaaagacacagaacagttctattcccctctcccccaatattcctctgtgcccctttatagccaaccctccaccccaaatcctggcaaccagagatgttttgtgtccctacagctttgcctttaaagaatattatttcagtggaatagtatattatgcagcctgttgactggtttcttctacttagcataaagcatttgagattcatcccgtgttgttgagtacaataatttgctctgttttattgttgagtaatattccattccacagtttgtttattcattcctcaattgaaggacagttgggttgtttccattttatggcaatcaaaaataaagctggtataaatattcatggtacaggctgtggtgtgaacctaaatttacatttatattggtaaatacctaggaatgggactgttagatcatatgggatggatatatacatttaattataagaaatgcttgatggtttccagagtagctgtgccattttgcattcctatcagcaatgtatgagagttccagttgctccatatcctctccagcacatggtgttgttgaatatttatccattcattgctgattttagttcttcaaagtagttaagttctataaagttcccaggaacactgaattttaaaagacaaaattattcgtcctagaggaaatagagggttaagtttctgtgagtctgtgctcataacttttttgtcaactgatcaatacctaactttgttttatgtgtgtttctgtttaaagacatcttatttagtatgtattgttgattcaataacattgcactggcagccaacagcagtataactcatggctagagacagcttatgtaacacattgtattttctccattaagacatatcacaatcttctcgcgcttgaacactagacagcacttcagcaagcactgtgcttggggatcattttaaacagtgagacttatcaacaaaaagcacaaacagggcggggcatggtggctcacgcctgtaatcccagcactttgggaggctgaggtgggtggatcacctgaggtcgggagtttgagaccagcccggccaacatggtgaaaccccgtctctactgaaaatacaaaagaaattagccgggcatggtggtgcgtgcctgtaatctacgcaggaggctgaggcaggagaatcgcttgaccctgggaggcgtaggttgcagagagccgagatcgcaccactgcactccagcctgggtgacagagcgagactctgtctcaaaaaaaaaaaaaaaaaaaaaagcacgaacattagaaaaatatggcattgaatagactttaaaaaggacacctgtttataatatgacagctgaaacaagagggcagaacatcacctcaatggacctcagtggggaacctgttctaggacgctgtgtgcacatacttgtctgccaatgaccgcatacccagtgttgattttggggttataaataaattttagtgagtatgcaaatttgtaaacacaaaatcctccagtaatgcgaatggactgaccttgtttatctgctttttttgccattctatggtctaagtttaaatgtcactgccctatagacatcttgttcttctctttttgtaaacctgattcgtcactctcttttcaaatcatttattatcttttctgccttcttctttagactctccacactagagtcaggaaacatacctgtcttactcgccattgtattccttatatcattaaggcttaccatagtgcctggcatacatagatgttgagtaaatatttgttgaatcagtgaatacttctttgaaagtagcatgtatggaagaaaaagcactggaattggagttggaaaatctggttttccattctagttccaacagtggctttgtgattggtgacaagttacttatattctttgagcttcaatttcctctcctgtacaactgaaaaactaacacctatctttagagatgtttttaagatcttaaaagtcaggcaataaacatgaaacccattagtatctggcacactgttgatacccaataatcactggattggagtggtttatgacctaccactagacatttataactgtatgagcaatataaaatatactaacaaacagtgtgaacagggagtttatttggacatacagatagtgctaactctccatgtatttggcattatatactcagagctcccaaataattaagataatttttcactttagaagtggatcttttgttattctgtcaacctagctatgttcttcagagtcaaaggttctacacacgatatactatgtacatgtcaccatgaaaactgataatttgtctactccatttcaaaaaaaaaaattcctgaatgtttaaaagcaattcttcgtaatgtagttagagtttgtactctctggaaacaagatttttttttctttcaaacactcctagacaaacaaggacatttagttaagaagcttattatgattctgtctgaaatgctttcttaccaaaacctattgtatcccttaggatttcaaggcaataaaaaccaataattttaataaaattatgtcaatcttcccgcatacaactaaggctaacaacataatctaaatgttaaactatagtggaaaagaaactacgtaaacaatgcataaggttacttcactcaaaatttatacagatggttttcttacaaaattacgatgatcagatatgattaatgatacgatttaagattattggtctttaatagaggcaaaacatgatgactcactgacaaagcaagctaatagcagggagggagagaaggtaagtttgtatatttgattacaaagcaaaacagataagtaaaaccacagagtaaataatgattatattatatgaaactttcattgtttcctaacttacatttatattaacttttctggagatgacgttttttaaacatataaatcgtcattaggaacctgacaacagttctaaatcaaacctagggtttaaaacatcatttgccgacagacatcctccaagtgttttccgcagaggcacatcacttctgattattcccaggctattttaaatgatcttggacagggctactgaatgacttgtcagcgaacaggaaaacattatgacaccacttctccagatttcttcccagaacacgaaatatttgggatcgttctaattgaatcaaggctagcttgaaaaaacaagttaagcttcactttaaagctttcagttttaactggaggaatgcttctaacatatggcagctgggctctgactcacagcaaccttcaaattctggccaaaatgtctgtttcctgagattgtgtctgatatgcctgtgtatccctggtggggcccagcaagcattcagtaaatgctattgttggaacgaatgaatgaattaaagggctcctaattaggagctacaaattcttccagcaacaaaataatcccataggaaagctgcaatgtacttggaattggtatctacgaagagttctattttcagctcctttacaaattatttttatcatttatgctcaacttggtctttcttgttgttgttttttttaaaccaagatgtgaaaagcacagaagcattttctagaacatgaaagaccagtatactttgtagaaagtttcatttgtatgtagcttgtgtgtgataattatttttaaatctcagttaatcatcatatattttctcggagcagactttgggtgaggcactacgtgaaatgtttgaaaaagatagttaaaaggaaaaagtcctattcttgactatgcaccaaaaattgtaactaacactagtagaaggtaagcagtttccagtaaggcaagtggttatctaaagaaatactaaattagaactgctatctcagaagtataaacaattgctataatacttttcaatcagacatctctcacatgaaagccttgtgaaataaatggaagacagaagccgaaaaaacagaaaagaaaaaagaaaagaaagaaacaaagatcagcagagataccactaaaactccaagaaccaaaagtttgtatatgtgctttaaaaagcatccctttgatatttactccgaggcttttttctcttatgtaagacataattctgacaaccttgatgtctgaacttccagtataccggagatattttggaagcacaacagagacttgtgctcataggcgcaaagagagacaataaatattgaaggaagagatttaaaaaatgataaaaagttagacctaagaactcaaaaagtatggcagcatggagccatttagcataggggcaaagagccaaccacacctgccgagtttctgagtgcatcctgtattacagcatactgtacacaccataataattaatggttataatgactttgaatcactaaggacgtattaacccatgaactctaagaagacagggacttacataatatattttgaaagctccccttccccctataaagtgatttagtttaggcacttatagaaatacgctgcagaaaattaattttttatgatgtacctcattttctgatactgccttgaatgtgacatggtatacatacctaaaataataaccctaactatttaagaccttacactcaaggacttaggtgttcttgtttcagtaagctgtgttctgaagcatactggaaaaataaagcgtgttccataggaagctacctgcattatacacaggcattttatttaactctaatattagccaaatatcaataaagtaaaaactcttcaaacacaaccctttccccctatttaaagctagaatgtttttgtaaatatttactggagtgatgagtgttcagggctcaagtttatttatacatcattctgtgaaggtatttgttgcaattgctatttatataataatgtttaacctgccagaattctggagaaagaaagattagcagttaaagcaagttcaatgggaaaaaaagaagaaagccatagacacaacttggcgttgtttccattcagtgcaggtgaagtgacaggtttctaaaagtatgctttatccatgcacacacatgataccgatacctttttcttggctgcaacgattctttttcaaaactgctagcctgtttccaaggcagctgcaaaacgtccgtgaaaactagttaatttgtaagaggcatggaaactgctgcctctccacctgccaggctagatccacatcgtacagactctacaatggcaggagctgagggtcctgagataaattttctcggctcctgcatagacggaggaaagggaagtgattgctgagaatgtcctagacatggacgcggagctcagatgcttttgggtgttctgtctctttcactccacatattgtcctggatgcagaataatactttttgtattaaagtcaccgtggccacctccaaattgcttttacattttattgttattatcattatgttgttgttaatgagaatgcagctgaaaggctaagtttgacacttaaaaacgaccaaaaatccagcaggcaggaatcatccccactcacagatagggtaagtgaagctcaaagaggcctctggttcagcagatcacaccgctgatggtagagctgggacttgaacgggggtttctgactcccactctagtgctcactacatgttgcaagatgctaagtattgaaaactgatttcctgttcctgaagagtttatattttgagaaacacaggttggcaagtgtaaggaaagttttccatggtaggactttgaaaaggaaacaggaggctgttttttatttcttcttcagaagattttttgtcaccacttctatctttctttctgttcatacactttttatattatctaatcattcctgccacgagagataatttacatggctcttcaacaacatgtcaccaataaatcaccaaacacattttaataaatcaggccttataacaatctacagtaaaccggatcatatgatgttgagcatataccaagcctggtcatctgatgggggttttacagtctctggtcctttctgtgtgaccgagaaacacacacagtttacaaagggcccccgtgtctatcatgacattggccttagaagttaagaatatacttgcagttatgtctcttcatttttatggccctgtatttcattaatttcattaagtcttccttgtacattttaatatttcatccattcacatggtcaggaggtctaggcaggctgattcatatttgcttaccaatagcagaaaggaagggttcctatgattaagtctaaaactgacctcctttccacatttaagggattatcatttggcatctctgctccacagacctttgctcttaacaccatttgcttggtatgaaatactgaattcatttagaaaagaaccatgattaggtactagggcttttgaattaaaacgtgaaatacttaattaggcaaaataacatggaacattaatggcagggattttagaggaaacaaaaatgtggcagccttagggttaaatgacttttaaaagtctcaggtatagggaatgacagacccagaaataaaaccctcaacatctcatacctgctcaatgttctgatcatttgtcacactctaggaagagacaataaatatatatctgtggaaagtccataagatggaaatgaggtggcctacctttcatcatttgcaatgatcacagacaaagccatttataaaaatacctgccataacagaagccgccgcatctcaacccaaaatgggaagacacagaagaggttgataaaaatgaaatcatgatacacgaatcctcatcctatcaccaaagtggttgcccaaagaggggtctccacggttgcctgatgaaaagcacaaatcatggactacccactgggaaagtggggacagagaagtgagggaatggcctcttcttcagaaggctgaatggctggactctgtcgaatgaatagataacaccattgcagaacagacagtggagatgaaagtaggagccaatgaaaacagaagcagggaggaaaaccatcaaaggcgtgaaaaaataacaaaagtccagggactgatgtgatcagcacccacatgctaaaattgcagctcgagagagccgtttgaagctgctaaagagatttaatacaatctggaatgaacagaaattgccatcaaatagaacagaagggccaccaagagaccttaaggaagggcaacctaatggaatgtgagccctgcaaagagctcacgtggcaatgtccttttgaacatctcaatcattctaaagtgtcgtgtaagtcacacacacacacacacacacacactacacacacacagtccagggtctgtggggaattttgatgggaggtgctcatcaaaagtcttaaataatgcaaggcaatggcaatccatccgatcttccactctgaggaccaggagcaaagaacagacgcaggtttcatcaaagcagcctctcatctttctagcacatctgcaatgtccatctcaccaggggtgaccttctgagtgaactttgggagagacgtgctctttggttttgtctgggttgcagtttaattcagcaggaagcgggctgtggctgggaaccacagcacaaagaaaatcacggtaaggaggtgaaaaatgcgggactgatcgacaataagtgagatgaaataaatgactggtagttttttatgagaccagcagaagaaaaatatataggtatatatgataggtgatcacttttaaggcttgttccccattgctgttactaagtaggcagtgatagaaacagcacaattgagcaataacactgagatcagagagagagagagagaaggaaaaaaaaccccaaaaaccaaaaggatcagagaggctctttaggactgtgtccaatccagggcgaccatccaaatacaaactttgaatttcattcaagtgccatgtggataaattgcattgtggagataaaatatagagactttagaaaatgattctgttttcatgcagatcattgtcgataactcctcaggactgagagtgttttggtttgtgcaaggtagaaaaatcagaagataataaaaagttcgtagtagataaagctaagaagtcatgtcacctaaagtgtatgggccagtggtctttcctaatttcaaacaaagggagaaagaacgtattctaagtagggacaagttaaagggaatttgcatttggaggtaaataaaatttctattgccgctcaattatcttcactctgccaggctgggtattattacatagacagtggggaatggaaaattctttcctcttgaatgggttcaatctctcagacctcagaagatctccaagggaatctccatagcaggagtggctagacccttgtttcaatatcttctgtctctaacccttggttgttcatttcatatcctaccatgtttccagcactgaatcagccccagaataggacatgagtagaatgaaaaagggattcgatttgccatagctttaaccttcctcaaagtcttctgtgtttatgtactacgagttttctagtgatatgaaaatgcatctttttaataattctattctgcattttctttgtcttggtagaaagcaaaatcaacatgtatctttacctcaaacaatcttgagttttgcaaaaaaaaaaaaaaaaaaaaaaaaaaaaaaggtggagtcttctttgcacgaggagtctagagaactcttagcacctagtaggtgctcaataaataccagccaataggcagggctcctttcctctgacagctggccatagacacaagctgctttgggaaacctgatggagagacccgcctttctggcagagccatcctcactctttcatcactgcactcaaagatattactgatgttggtcctctggttttgctgcttttttcctctgactggactaactgagtctactctgctcactagctgccacttcagaatcctgtcacgcagcggaaggccaaaggacattttcccctaagtccttttaacttcctggcattccgtttttcaaccccacattaaaggtgctgatgtttcatcctagtcctaccagccaatgggtggcctcaagttagactaggcagggcttctatcggctctttccctgttgggcacagggagaaggaacccagagaaatgtttcctcaagctcattttctaatttttccttggatgctatcactgaagttctgagatcatgtattaagaaacagacacattggaaactaacatacaacagatgtcaacctagggccaggactggccagcaagactgattttttgcaagttctcaaaaataatttttttctttttgcttgccttttttcccctgtgcccttgtccaatgcccagtcatcttataatccattaaagctggtataccaattctgtttccttcccaagacaagacctgccaacttgaaaaataaaaatgaacctcccctctttttggcatgttcctccaagcctcaactaaccccgggcagaaactagtggatgtatgcccagttgaagcctgaggttagagtcataatttttacctcctttagcgaacaattccctggtatgttcctgaattgtcattcttagtatattgctagaccaggcattagcaaacccagcagactggcattctctgcagtttggtagaacaagcctgctgtcatacggaagctgaaatccgagacacctctgtacctagaagaatctctctctctctctctctgttttttttttttttttttttttttctctctctctgttttactctgtccccaggggtaaagtattttctgcaaacatgaaattagtttatattttaagggctttggatttactaattttgactaagttaaaaagggcagagcagtctcctagtactctcctgagtgactcaatctgtgattcttgggaagggtttaatggacatattttattttcgttcagggtgacctcactgatcattgtgcaaaatgccttttcttttttttcctccttaaaacaaaataactgcaattttctaggcatttcctagagaaggaaactgtatttttttttttacttatctttaaggccactgttcaggaatttttttttttaattctatttaaagtgtaggtgaaggtgattatatctttccaaagtcagtaaaacaaatgtgttgcataagtcatttcaattcaattaagagaaacaggtcagatgctaaaatattagtaaaatcaattatgagtaataggtctcctgtataacatgtatcactacaaccgcctctctcataatatttgaataaatttacatttgtttcgtatctctgtgtgcctgtaatatacaggggcgtcacttgaccataaaaccttctctatttccttctctttgttacattttctctggtgtgccttggaaatgacatgtagactaaccctttagagtgaaggtttttctaaggagagaaagcccggtgacaaattaaaaagagctctggagtcagatccagctttgaatcttgtcctgtcgcttgtcagttgggcagggaacttcatccttgggagccttgatttcctcacctgtgagggtaatagtacctttccacggggttgttctacgattcaaatacaacaacttgctgtaacatgcccaccagattgccaggcacgtctggcattcattaaatgaatgtctctttgtgaactcttttgaaaatcctaaaaattactaatatataagagaaaataataatcacaaaatctcaatttgatatctgtgtgtgtgtgtgtgtgtgtgtgtgtgtgtgtgtgtgtgtgtgttaggattacagccacaaagtcacctgaaaaaaaaaaaaggtgtcaaagggaaagactttcttcttactatttggtaaaagggcaccctcaaaatctcaggtagacagttcatgggaaggccttatgggacaataaatttctgctgcaacctcagtagcctttctttcagacaaacaactgatatctcatatggggaaattatgtgaaaaaaaaaagaatacaacattgagtctatgccataattggaaaaacatgaaaatgacatacatatatgataaaaaatgaaaaaggaaaactggaaattttttggtaggttagtaaaaaaatggtcattttttttcctttgtaaaatcctttattcttacaggacttttgaacatttaagtgaaaaatagagaattgtgtgattagaaattcatccttttaggctgacaggctacaatgcctgtcggttgaaaaagataatatctcaggaagttaagtacagtttggcttaatggagtactttcctcctaatcgcacagaggaaatgcaagcattggcattgactgctggggaggaggaaggaaggacaattttggagcatgggccatcagctgaggggagcagacctggagatagtagaccctaaatcgaaataaaaaaattggagcagcaaggcaaatcagtacaaatgcaacctctggaaggttctagttgtgtaggaaagagcattaaggttgattcttttggagtgtttctgtgtatttttgaggaaaagaggcattcatagggcgcattgatgagaaagtcccaagaaaagcattcaagggtttggaatgcagttcacggacaatctggcttataaagacatggcttctgtgtcggttctatgaccctttgtggggagggggcagcatggcacaggagaaagaacaaggtcttcagggcttgacagaataaggttcaagcccatctctgccacccactagccatgtgtgctgggcaaatggcttaatatctaaaactcagttttctcaagaaataggatacttaatatttatagtaatcataaggtttaaatgagattatacacacgcacatgcagacagacactgacatgcttacatacatatagctgcctggagcatagtaagctctcaaataacgcaccttttctcaatgcagggagcagaaaagagaagaactcccttaaattaataaagttcttggctgtggctccatcccagtttatgtgctcaagttgagaccagaacagcctgctcagggagctacaggttgaagagctgtcagggaaaacagaacagcgtcaacccacacacagccccctttctgcttcctagaacctggtggtggatcagctgccactatccacagccacccaagtcctaatgctctctcgtgtttcctcatcttagtgctagtgcacttggcagagctgatggctctgattcctgtattttgaatcctgtaatagcccatgctgaccacacttggggtcaggggatatagataaaggggcactgggtggcttctcttctccacggagccttgagatcgagtgcttctaagtcctgaaggtttgcctatcttatctgggaaaccagtaataggaaagaataacaccccagccggtatctctaaccctcaccttgcaacaagtgtaaaatgagaaggggagggaagattcgccccaaagtctcacgagatggggcctccaaggacttatcaggagcttgctaagcaggtaactctgtaccgggggctccagcagcagccggggaggagaaggctgataatgggatttgcgtttacccagcaaaaccaacagggagcaatcttcagtgggtggaggaagaatgtgagctcacgatagcccaggtccggggaagctgctccctgccagcctagctcataaggaagttgtttatgttttctgtttgccaaaaaacctttgtgcgctgctgaaacctgtttatcctgaactcctaacaatcaacgcatggcaaccagttcttcagatgacaagtccttttgttaatgagcaaggaatgactgacgaggccctgctgcctgaaaccccttagctgcatggagttctgtggatggaggttgagagggctgcttcgaaaataactctgctttctcactctccattcacccatgtgccccagctcttgacatgtgagcaacctataagcatgattgttatgagcatgtctcatttggggggtgctgaatttagttcctctaaaaagtgccattgctccaggagaagcaaatgcacctctattggactcttataaaactcaatgtgaagagcattataaaatacctcaaattttgtccacatatatacactcacatgcataaaacactttatgtcctgtttaatgtatgcatgcacaaacttaggcacacatatgtatttgtggtttggggatcaaccgagagcaaggtaaattagggaacatgtgaattggcagtgttaagcaatttgataaaagtgttgatcaaatcccataagggtgtgtgtgctcagggtggtgctatgacgcgtcttcagtgtgtgtgagactaatgccagcgcatgcgtctgccctctcatctctcaccttgttgtctgttaaaatctcatctcccacacctgccaggcaacctcccagttgcacgagggctgtcattggttggtgaggattgagaaattttgatttgtttgttgttttactggtatctgttgtgaaccaaaagttagaaaatattccttgagtccttgtgaaggctcagaaagaaacaagagccgggaagagcagcagaggggtgtttgggggaagttgtgaagaattccaggggtcatggggtttaagaaattctgatcttggaacagaaacagaccccaaacatgtcagaactgcatttcaggaaaagagcttaggaaagaaagtttctcaggtacaaatgaactgattttccctgagtaatcttgtgcgttgcacaaataagaatgatcatacctgcgttctgtggttgaggtacatccaggttcagctcgactagctgcaaggtttgctgagtcaggggaaaggctgtaggaaaccccctggtcctcaaaaccccccttgttctcagaccagcctcacgtctacctctataagtaacaggttgagttctcagagaaaatacattgaagaagacttgatgtacatgcttttactatgatgggcaagattcatataaaagacaatgcatttgggggaagacttgcacaatatagaattgcttctgaaatcaatcaaacaaaaaagcccacaacaacacaatcgccccaagctttctctcctttctgtcctagcacaacttatcagaggcaggggtgatatgatgatatgtattctttactagtgagtacagtaggacagggagtgtatctgtctggctcagtgttatagtcacagaacccatcacagtgcctggtatacagtaggtgccattttattgctcatatttgttgaatcaatcaatcactcatacaagggagagcacccagccccagtcttcattaagtgcttgtccactaattgaggcaaagaaatcatacctggtccattgaaatttgggggccctatttttaccacagaaacacaggagcaaagggtgaactctgtactgagttttgaaggcagcaaggtctgaggaagcaactgcgcaaaaggcagaacgtgacagtgagaattcctcttggagaacatcctatccatagactcccccggagggactgcctgcagaactgtcattggccaatttcaatgcgtgttacagattcatagcacagtggatgatgagctatattaatcaggaaggaaggaagaaagagtaaagaaaaaatacacacacacacgcacatacacacatacagacagagagagagagagagagagagagagagagagaaagagggagagagagagaaacctaaaactgtgagcttcttctcagcctggtcttcattaagaacttcaaacctggcgatgggcagatttgccctgtggtgggaaggaggcctcagttcatccagttcttgataacagttgctaagcccaagtttgggcaggactgttccagaggctgggcctggctatgtcagggtgttgctgtgggtatgggggaaaaatagagaggcagctagggataagaggtgctcaagaagtctgctgtactcttggcaagccaaactctggttcttaaaactaagaagtcatagagaagtgaatggggcttgtaaccgagggcaatttttaattatcagttaggaatagactactacaggccacagataaggtgttaaacagatgttcttttaatagttatccatatctttcttttcttggccagtaacacttagcttggctggttttcttctcctgtgttgctggaggtggggcagaggtgactggggactctaagaatctgacagtaacaccatcctcagaaacagtgatggagtaatgcttgggtaccagcattcaagactcaatcaactttggccaaggccaagggcaacctctgctacattgctctctgctctgacccctgcctacccacacagcccctacagatacatgtagcaggtggtgacacagatcccatacacgcacatcttgaagcccgtcctttgtgttcagtattgcaccccaggcacctggcacacagcagtgccccaaaaatgtgtcaaatgttggatgactggattaaaatattaggaggcaggatacctactttatgttatagttgcccctaccaaatttcaactcactataaaatatgtgaacacaacttaaaaaaaaagtatttattctccaggagctttataagaggcaggatacataggtaacatgttctttatactttgatgacaaaaagaaaaatgaatgtattttctcatttcaggataggagaaagtcatccttcttttgagttttacctcttaaagataatccccttctcactctccaaatgtcactttccaacatttctatgttatgggaataggtgatttctttgtaacttttcctgccttgccatttctccaaatcttgctaatctgctgggtttgaagctcatgcatttgtttttcccatctgccttaacacctccttgctgacacatgcccaaaggtgctcagcataaaaagggagtggtcttcacaaacataaactaggtgttccctgttcaaatgcaaacttgacaggtattctcacagggaatactggcacctttccctcaacagctgtacaaaaggttaaaacttgttcctggcaaacacagttacactaatgcatcctacatggattgtcccttcttgtgcttcactaagctctaattgcaatcatgttggacatcaactgcttactgtaatgtttcataatgtaaagtgcactccaggattcagtggtgctttcttcgagttaaagcatgatcgtggtaacgaaatgactacaaaaattgacacacattcttcaatggatcatctttctttggagacaaagacaagttgtgactcctcctattattgaggattgaatttagttttatgcactgtcagcagccacctcagctgcatttgaacaatttggggacaaactatcttggggctacaaatatggcaacccatagtcacagatgatgtatcatgatgatgccttttacgtcagttcataatcatcagggctgaggaaattttgttttgctttgtttcctaaaatcttttaaaattttattgcataagaatatcataacatataagtcaactgagaaatttagtagtaatcctgtaacactaaacacattagctgcttccctccttcccctcatctcatagcattgaaatctgtctgcatacaagcgggagttctgcctacaagttggtccccacattttctgtattgccactttatcataatgagtcataatgtattatcacacaaggatcatccatcttgaccacttcactgtggctcaggagctgtgaggtccaccaaaccactcaagatttcagggctttatgcttttaagatccagaaccacaggcattgtttgaggcactttctgcagaaggtgtaccgcatctttgcctgcttttgcaggcctcaatggacagacagccgtagttcactaggctgattctctctgttcatttattcaggtttccaagagctccatccaccttctctgacgtcttccccagtcattcctgcccctaagattcttcctgtcccttcaactcctgaaggtcccacggtcagcatctctcactatctccttttgtagctaaagtatagatgcttcgttaccctaaccaaactctgttgctttagagtgaggaatctactttagacttctttggagtcccaggatatctggtgcacagtaagtattaatgcatatttacagatggatctgaataatatttttgagataaccatcaaatggaaagtaagtgaaaataacatagaaaatgtgaaagggaaaaagacctcatggtattagctcaaataaggacagggaccacatctcatcccttaagtgacttaatctctctgtgcttcagtttccacatccaaaaaattgaaatcataatagaacctacttcataggccgtcatgaggatcaaatgagttcttatgtgttaagtggttagaacagtgtctggcatgcagcaaatggtacgtatttttaaatgaaaataaaaattaagtaacatggtaatgtccaaatctagggtagtacctgccacagagtagctgctcaataaaggctgaactcaattactgtctgttttgtgacacttgcaccagcatggacctgggagggagcagcagctgggaccaaggggctggctggtgacagtatcttccaggagaagtgtttgggaaagcagtaagctccacactccagttcaaaggctctggaagttaccaggttctgccacaaactcgtttggctggagtgctcccaggtctgggatgtgtggcttttcgggttagtccaaggcacagttgccgggcaccctggcgctgatggctgctggggagagggggacagcccggagctccgcctcccactagcagctcagagccggcacggaaagttactgcatgtgaacgtggcaggaatgatggaaagcccagggctgccaagtgctgcaatcccgggctgcgtttcttatgctcacaggcaccagctcttcagggagtctagtctatacacgcttcctgcgcataactgtattctttcagcagttactatgctttggcgtagagggaggagacaaaagtttgagggagtggcagtgaggcatgagccaagatcccatacacaatgtcttccttgccctaagatgttcctaagaagaacttataatttcacccactgtattgtgtatctctgaactttcatcgaatatatatatatatattttttaagaaaatacctctttatcaagttcagcccaccagaggcttccatttgtctatttgcccatccattttttaacaaacatctcctaagcatcaattatctgtcagctacccaactaggccctggaaacccagagaagctcatagtccactgcggagccagagagtaaattgttgctatataacatgaagggctataaccggggcacacacagagagctacctggcagagaattatttctgccaggtggggacagcagcctgcacaggcttgcaggggtgccttgttagagctgggctttgaagaatgactccagtggggaggtcaccaggtgaacaagtggcctaattaggctatgatgtacatttatcatctttgtcccacacctgctttttaagcgaggctttaaaaatacaaaaacagattgtgggttggggaacagtattgtatcaatgttacattccctgattatgatcattgtactgtggtcatggaagagaaagactatgttcctaggaaatctacactgaaaaagagtaaagggtgggggccgggcgcagtaactcacacctgtaatcccagcactttgggagggcgaggcaagcagatcacctgaggtcaggagttcgagaccagcctggccaatacggtgaaaactcatctctactaaaaatacaaaaattagccgggcgtggtggcaggcacctgtaatcccagctactcaggaggctgaggcaggagaattgcttgaatccgggaggcggaggtcgtggtgagccaaggttgcaccgttgcactccagcctgggcaacaggagtgaaactgtgactcaaaaaaaaggaaagcggaatgttccctccatgtagtacccatagtatgtgtatactccctctataatagtatatataacagtatttatacatggggatgagaatgataagcaagtagagcacaaggttaataattagtgaatctggataaagggtgggtgggagttagttatgctacacttgcaacttttctataagtttgaaattatactaacacaaaatgttaacaaaaatgtataaaatacaaaagatactaaatcagcttctaaaataccaagatgcaggctgggcgtgatggctaacacctgtaatcccagcactttgggaggctgaggtgggcagattgcttgagctcgggaatttgagaccagcctggggaacatgtgaaaccccgtctttactaaaaatacaaaaattagctgggcatggtgatgtgtgcctgtagtcccagctactcaggaggctgagataggagaaccacctgagcctgggaggtggaggttgcagtgaggcggaggtttcagggagacaagactgcatcactgcactccagcctgggtgatgagccagacccggtctcaaacaaacagaaagaaatacaataccaagataccaatgccttttattaccatcattctgaaaaggatcagcaattttaaaacataattttaaaacaattattttttgaggtgcagtctcgctgtgtcacccaggctggggtgcagtggcaaaatcttggctcacggccacctccacctcctgggctcaggtgattcttccatctcagccacctgagtagctgggagtacaggcatgcaccaccacacctggctaatttttgtatttttagtagagatggggtttcaccatattggccaggctggtctcgaactcctgacctcaggtgatccacccgcctcagtctcccaaagtgctgggattacaggcatgagccactatgcccggccatgtcataatctttgattgcaaggttgcagctacccagtgagaccctggaaaccctgaggaatgccgtgtcttccctgtgtcttgcctcacttattcactcccttctttttttccctgaaaccttgaaatttacagtgtaaaagagccaggatagcagtgaagcccaccacaggtgtgctctgcaaagtccctgaaagaggagggcccaaaagatgttgcttgcctctctgcagtgtagggacccccaggaatctggagaggggtcagtctaaaatatttaaaattctttagtaatgcccaggagggggcagtcagcttagcaaggatttgggatctatcagcaactacaattctattgcacttgcttatgatacatttttaaaagcagaaagcaaaaattaaaaataataacagcagcagctaatatttacccagggctgatataccctaggcacttgtctaactacttaacatggacatctcattgattcccccatgaaagcaccatgaggtaggtactgctaatgttcccatttaacagacaagggaactaaggcccagctagtcaatggtggaattggatataagcacaagtggcctggctccagagccaggctgttgcccataacattatgttgctgtgggctctggttaccgctttatgtgaatatggacaaaggatacagagggggatgaaagcagtatgattagttggggtggcaggaccccagtaagtttacttttattttgatgttcagtgttatttaggtattaaataattttttaaaatcaaaactattggttgatcatttttgacccaggagacgcagtttgagatatgtgtgcctaacatagaatctttatcactaaataagttatagcttctctgtgacttgttttctgtatctgaaatatgagatgatagttgccaacattttcccactaaaattcttgctcgaaggttggaattctgtgtatggtatgtggaggacatggagcaggtggagagtagggggtgggaaagggtggggaggcctatggtggggtgactgcagaaatactctataggacaattactcactggtggaatcaaacattatgcatgaggccaggctgtgctttctatttataaggtattgttcaacattggaaagaaacatcagatctgaattagggtttttattttttccacctttccttccttctttttttctctacatccctctcttcttcccttcctgtcttccttctttcttttcctggaccactggaagcaatgtttggtcatagttatatattttatctgatagaagagactagcagagacttagaccatagagagtcaagaggcctaaagaccttagcatatcttcctttgaatccagggacacgacccgctgatataagttaacctcattaccacatgtatggaagaggtcctcttccatttgctgcatatatatatatatatatatatatatttgctgtatgtgtgtgtatatatatatatagtatatatatatttgctgtatatatatatatttgctgcacatatatattatatatacacacacacacaaacacacacaattattcattggaaatgtatctacaaaaggtaaattgtttgaggtaaataaagggacatgctactatggctacaaactatgttggttagttggtattttcttcctggtcacctttcaggcaatttggatagaaagcacagctttcatttctgtgtaacatccatctgtgttcaaagatgcttttgagagggccaagggaacaatgatttaatgctgtcaagtgctttgagatctcagacaaagaagctctgtaaatactgagcattagcaaccccagtatcattcccctcagtattatcaaggctttggaaaaattaaccaagaaatgggccctggcatattgagagcagcaatcgtttctggaaagctttaaagaccctctacattgggaaatgtagggcttagtgaaaacacttgcccaagaactacttttcttcgtttgcaaattcaaaccaccaaagactaaaacccgctacaatgtggaaaagaaataattagattaaagcttttcaaccaagctccaatggagagagggcaagggattgtgggtgtgcatgtacttaagagacacagacatacagaaagacacagaccgggcttcagaaaaacaacaacaacaacagaaaaaaggcttttgtccatgtttagatttaccacaaaaacaaatctttttttttgttttgttaagtaaaaaacttattcattatgtttggtgaggttgtagggcaacaggcactcacatacattattggtggccacataaactggcaaagtctccatgaaggaccactttgcaacgtccattaatattacaaatgcatttaccattgtcctactattccgcatctaggaatttatcctgtacctctatttgcatatgtacaaaatggttcatgtttgaggatattcactgtagctttgtttgtatttgcaaagcctgaaaacaaattaaaaatttattaggggattaaataacgtctggtgtatcattaaaatggaatatcatacagttgttaaaaagaacaaggaaattgtgtacgaaattgctatggaattatctctaaagatgtggcgtgaattgaaaaaatcaagatgcagacagtgtgtacaaacagatatatttgaatatgtatgtttgaattcatcatgctaacatatttatagaatggattttcggaaggctgcataagaaattggtaactgtggctaaggcataaggcttacacctctaactttacatcctttcgtaccttttgaatattgtatcatgtacctatgtgtcctattcagaaaacaaaataatgctaatggtgtatgaaaccactgattaaacaacaaagtgaaaatatgagctttgtaacattttctagggatgggggtcgacaagttgtgtcttcagagctcccacgttcttccttcctcagcagggacaggcttctcagcacgctgctgcctcagggagcccaaagggacaccaggaatgctcagcctgtgttagctcacgactatttccctgcctctaacttctctagttccccacagttcaacccagggtgggtagcctggtgtctgtttgagctcaacctccccaaaccaggaagcccacaagctgcaccagtcactgtcaaacagctagctgagcatacagggaattcccctcttggaactgacagggaaaatgatccctagggattagggcctccactgggctgtgtcaaacatatttcatagttcctgcaactctgaccagggatcgttttgaaattcgggttttgttgttgttgttgtcgttgttgttgttgttgcaaggaacaaagactcaccaaactaaagggtgattcttgcaagaatgcacatggagtaatatgagtagccgcgttctcatggaatttaataagaattataaaacaacaacctcaaaaatatcattgatgaactacttagctgcccagcatggtgctcagtgctttgcgtggattgtctcctgtcaaccccatcataaacccatgaggctgtcgctgttattacccccatttgataggacatttgggcttgtagaggtcactgtcaccagagtgggtgggccgcacagaaacaggatcgggaaaatctgctgctctcttgctgtccctctcgtgggcagaacagtttctctgccttaaggttactgcctttccctggatgtttgcctctcagttctgatagtaactgactcactcactcactcaccaccattgggctcattcatagactttgcttacttataacagcaccttctacagagggattcacgaccttctccacctcaaatctctgtgcttcagctgctgcctacctgcctcctcctgttcagatttccccaagagaggacttgagagatcacccttctgttggaggccagccacttcactggtcacctcctgacctttggcttgggcatcccacctcgggttcccattttgattcattcctctgtggctgaagggtaacagtcctcatgggcttcatcttttccttcactcgtcagatattcttggagaactgactttaagccagacattgggttgtgggtggtggggggagggtacacagtgatcagcagagcaaagaacttgctctcagtggctcttaccttctggctccttcacctgcaggtgtgggtgtggcagacattctggcctgtccagttcgaagacaatgacccatgattgaccacggcactcttgcctcagtctctaagtcactgtctcctggggccccctcattcatgccttttcctggttacccatctgcctccagaaactggggctgtgctttgccccagtgtactatggagtccaaggtgatcagacagatggctccaacagctgggtggagaatgatggggaggagtatgggggataatgctcagaggccctgtgaatctgctgccatgggcagtggaatcccagccacaaagaatgaggtacttacaattctcccataattgttgactaaattccaaagctgggctcctctcttttcttttctttcttcccttttttcaataccaaatagtttgaaaaaattccaggctttgtcaaatgccctttcctaggctcaaattaaccttttccaagcgtctttcacattcttcaaactcttattaatccctcaaaacccagctccaggcattgccctcctcagtgatttcttctctaaatttgagataatcatgccttcatatggactacttttgtacttggcatacatttttattgttacccttatcatactgagttgcaaatatttgtttagatgtgtgtctcctctcctggagtataagcttatagagagcagggaacatgtcttaattatttatttattttttaatttaaataaactattttaggatagttttagagctacagaaatttgtaaaaatagtacagataatgcctgtatactttattatctggttaacgtattgctttactatggtgtgtttgttacaactaaggaatcaacattggtatgttactgattatttcgctagtttttacctggtgtcctcttcctgttgcaggatcccatccgatctcacattatgtttagctgtcatgtctcttttgcctcctctggtctgtgacagtttctcgaactttccttgtttttgatgatcttgccagttttgaggagtactggtcagcagtgttgtagaatatcccttaatgggtttgtgtgatgtttttctcatggttagactggggtttgtttattttatgtatttattcttttggagatggggtcttgctttgtcacccaggctgcagcgctgtggcactgtcataaatcgctgctgcctcaaactcctgggctcaagggatcctcctgcctcagcctctgaagtagctaggaccataggtatgtttactgcacccagctaatttttacatttttttaaatacagacagggtcttgccatcttgccaggcttggttatttttaaacaccagcactgaattaaatacccagcaggtaccacctagcacagaccaggcatttaattaatgtttattgaactgaatagaattcaagtatttcttcagcatcttccacataaatagaagcctgactgatgcccttggagaggtgaagaaaggaactcaagtcccgtaaagatcttccacacagctgaataataaaagacggtatgcacccaaatgtcaagtaaggagaacccagagaatgacctattgcagctcaagagatgaattaatcagaatgagcaggtgaagtcagcatctgtgtgaaagaggtgtctggaaagggggtgggtttagagaggcccgttttagttctcaagcacaaggagcttttccctgagctaggatctgctcacatgctgagcctgaagtccacaggtatttctacccctcttctctcatggctggcaggcttctcattcttgaggccttggcttaaatgtgacctctgcagacctacactatctaagataggctccacctgccactctgtctcacagcactccgattgttttcttcatagcttttcgatgtttataaggattgactgtttattcttttttttttttttttttgaaacagagtcttgctctgttgccaggctggagtgcagtggtgtgatctcggctcactgcaacctccgcctcctgggttcaagcgattctcctgcctcagtctcccaagtagctgggattataggcatgcaccaccacgcccagctaatttttgcatttttagtagatacgaggttttgccatgttggccaggatgactgtttattctttattgtctgtctttctcattagagtctaagctccttgagggcaagtactgcgttttgttattcactctggcagagcacatagtggttctcaaattgtcttgctgtatcaatgaatgggctgatgttagctgagactgagaaggcatgagacagtgacaagaagatatgtgaggagttgctgtaagaggccctgaaatggagcaagagtgaactgggtaggcagatgggatgctgccaggtcatcagactgatcacaatggtgtcaggtcataccaaatggggtggcataatttgggcaaaggccagcaatgtactaggtgtgggctgcacagatgtacgggtcatccagtgattttccatcttggaaaggccagccagcattcacaggacaaagatggggggattaggaataactgaggtcaagggaggggcaagggctataggagcgtctacataaatcaacactgagaatgtattccatgaatgaaagtaacacaaaagctgttggcaggcaagggtggaacccagcctaacttccatggtgttgtcacaagcccaagaagaaaaagggaactctggtgaatacttctgaatgacaaagataaaatggaagacctatgatttggctattgggctataaaaatggacagccatcacatgaggaaacctagaaaaatgagataatgagcttcagggctcagaatggaaagaaccccatagaaatctttgatcttttccaccatgagttctacactgatgcaaaggacagaatcagaatatacattccctgatttggaaagtatatattttcccatccaagttcattgtgaactgctgaccaaaagggcagtgttttatacagattctgtctagaactagcccagtgggaaaagcctcggaaagcatatggcaaagaaactcagactccagagtatgatttagtaacagaaagagtggtgtgtcttgtctttgtatgcccgtataaataatcacgatggctgaactctgctatttttcatccaacctaagtaacagctttgaaaaaggaagataacaatgacctgtgtgtacagcgtccaagggaaccattagcagtggagctccccaggctcctgggacgaccaagcacatggtccaaccaaccatcttctgacaaggtaggggtgggcagtggaaggcaaaaagaatggctgcacttgtgtttctgaaggtcagaccaagaaaccaaggagcgtgtctttgttatttcaaatctatagcctttgaagtcccagcaggtaagtgggtgagtctcatatacagctcaggaactcctttctcctctgtacctccttagagatatagggctaagacagcccaggtgttagcctgtccaagcccttcatttgcaaaggaggaaactgatgggcagaggacaacacaaactgcccaaagtcacactggtagatggcatttgggccaggatgagactttctttttttttttttttttgagacggagtctcgctctgtcaccaagctggagtacagtggcacaatctcggctcactgcaacctcctccacctcctgggttcaagcgattctcctgcctcagcctcccgagtagctgggattacaggcacccaccaccacacccagctaatttttgtatttttagtagagacggggttttaccatgttggccaggatggtctctatctcctgacctcaggtgatccacccgcctcggcctcccaaagtttgggattacaggcgtgagccattgcacccggccagcagcatgagactttctaacccagctttcttttcccaatcttaagcagcccatctggggctatgtgactgaccgctaaaactgcctctgattccacattttgatttttgctcccataagcactgttcacagttttccccctcatattacttctgtaacaaccttgaggtggtcaaggaaaagaaaaaacaccatccacattcctaggcattttaaggaaatgcacaccaggtatctgacccagactcctacttccctgccaatctccagctcatatcaattcatttccctaacagaaaataggtgtcaactttgtaggtggaaagtaatttccctgcaaatattaccggagaggttgctgacactacttgacagttttattattacttttgttttgcagtaaggtgggggaactctacctttgccaggtagaatactgaaaaaaaaaatgtagagcttttaactttgtattagttttaacatcggaggggaaaacaagaaacaaagaatatgtgtgctgtccgcatgcccagtacggctaagggcaacctcacaggctcctggcttacctcacttctcacccgcgaactttcagatcctggagcttcagtgtgggttagagggaattactccgcagcatctgaaaagccagctcacaggtgggccgctggggcgatttggcagggcctgcttgtaaacactggctatcaactcctttacaaggtaagccaaccaggggcaagttaactcgctttactcttctccgggtttaatagaaggtgggtatacttttataagaacccaataatctaaatatttcacacgtagacaagaaaactagaaagccccaagagaaccgaaagagtattttattaataactatttatgtgtagtagctacttaaattcatgtttcactacctattttttttttttttagacggagtctcactctgttgtccaggctggagtgcagtggcgcatcctggctcactgcaagctccacctcccggattcacgccattctcctgcctcagcctcccaagtagctgggactacaggaacctgccactacacccaggtaatttttttctatttttagtagagacgggggtttcaccgtgttagccaggatggtctcgatctcctgacctcgtgatctgcccgcctcggcctcccaaagtgctgggattacatgcatgagccactgcgcccggcctcactacctatgtattttctaaagggtcagatagacttaggtgtaggttggcccgagaaaatgcagggttcccagttaaatttgaatttcaaatacacaatgaataattttttagtatattccaaataatgatagggcatacttttattcattgttcatcgacactgagtccattaaccagctggtttatttatttattattatttttccccttgcttcattcttttctgaccttctgtggcttaattttaggactcctattagagggtggagggagaaatacaactcacacgcatcgggtgtcctacttatcattagctgaggcacaagttttgggaggggagggatttgctactttgagctaaaaatggtgattatctgcattctctctattaccatatggacagaattagccatagactgatattttccagagactggattttgcaggccagtaaaatccaaaaagaaaagaaaagaaaaggaaattgggaaattgtgagaagatcaatatactgttgccaagtttaaatttgatcaaaaaagggtgtttaaaaaaaccccacagctaccatcttcaattaccattaattcataaaagaaagcaacatttcaataccccaaaagtaggaaggacactctcttctttatttcttaaataaagttggcagctttacaatggattgccctcatttttgtggaaacttcatcacaatctggtgctggctctgagatctgagaatatgcagaccaggtcatgccacagcagcacctataaagtgacagcagcaatgctgcacttttcacaggtttgtgttggtagcagataaccacagagcaccttgcagtaaaggaaggagaaggtgaacgtgtgccagttcgaattctgatgatcttaaattaatatttaatttaagcattttatttctgagatgtatattatttgtgtggaagcatagtgtgatttttctcaaaccacaaagcatttctttaacttataatatatagaaaacgtttttccaaacttcctttggagcacagctcaatctctgaacttttcttccctatctctataaaatgaatgcttcaggaactggataatgtgacgctgaacttaaatagcccccttcctaagagagttcagaggtctttgaaaatacaggtaattgagcctcctggttcctgagagctggcagaatgtgtgacctcagctgagaagagttgggtatttgccaaaaggcaggtgtagttggtagcagtgctcagagaccaagtccccaagttcagattttctatccctcttcccattgtatacaagggaaaactatggtgtgaaagtggatgattgcctgaaattgctgagtaattaaaaggaaccatgatgaaaataaactgcccagcccaaatatcatatgtagtttcttttatcttcctccaacctgagaaatgtatataaaggtatttttaccagggaaatccttctttaaatagggttgaaactcaatttcatatgctgcagagagatgcaaggtattatgtaccaatgatccctaaatattcttttcttcttcacatggctgtgaagttacaaactgagtatccttttcaacggcttgttgaagcaaagaattaaatatacatgtacagactaaaatatatgttagtatattctttagaaatatgaagaatacccccagcttttcacagtgataatctctgggtggggtctttttaatattatgtttttctgtaatgatggagttttaaaataattgtaattgtctattacttttagaatacgtaaaaaagatacacagcatgcacattctcattaaaaatcacttcaacctggacttttgggatgtcctttaaagtcacctagtacttgcactttcccacagtcctctgtccagcctctctcagtgacctgagacattcagtgccacttgtgtattccagacatttgtctttctgagagaagcagtgctaccactttttttttttttttcttttttttgagccagagtctcgctctgttgccaggctggagcactgagacacaatctcggctcactgcaacctccccctcccgggttcaagcgattctcctgcctcagcctctggagtagctgggactacaggcgcccgccaccacgcccggctaatttttgtgtttttagtagagacagggtttcaccatgttggccaggctggtctcaatctcttgagctcgtgatccacctgccttggcgttccaaagtgctgggattacaagcttgagccaccgcacctggcccacttttttaccttctcaaaaccccaactctcctgtaattcctgaagcccaggtaattttccccctagccccattgaatactggcttgttttcatttctctctctttgtcttttgccttactaattctgatgtgattgttttttcagcctcaactgaatagcagagagattttggctttcattccagaatgatgtctcacagaaagtcaactcgtgttccaggtatgtgataaacatctcactagtgaacttcttgctgtttctaagcgattaacggtttggttagcaagcccagagccctgcagataccttttgcctcctacacaagaagtaagctaatgaaacccacggagcacggcctgcccctctgcttccctttaatggtttctgtcacccaggccaggctgccgccaccatgactctgcacatcgatgtgccgcctcagggcaagcagaatgcaaatgacggtggccctcaaattgcaatttaaggatagctgttatatcttcccatatatttctcttcctaacctccaaatttgaggataatgtgctgttttaacttattcttagtaggaagaatgttaaaccttagggtgatggtagtgtattgctgaattctgtgttttggaataaattagatttttttgatgtggagaagggagaaagggggagaactaaatgcaaagataatttgattttaaaagctggagtttcctggttcctgggttctagatatttaaaaaatagccacaattaattatgtaataaattgtaggaggttgtcaagttgtcatctttattaaggtgtttcttgccagacatattcaaaatctgtgtactcagatgttaactgcatttgactctattgattaaaatatactttctgccatcaaaatggaactccaagatgtaaagggaaagaacactttaaaaggcgtttccaaagtcgtcttggatagaggagctttcatccaagggtgctatgtggcattccggaaatgaatcagagacttgggccctccacttccttagaaacagagacacgctgaagatcgttagggtaaatgagtgggacaaagtacactctgcattttctttttaatttcaactaaaaaaaatgctgcactcttgtcttggctggagaaacatcctcagcctgttcatctcctatcctctgcccaaatcaactccaaatttgactgactgaattttcagttcctatattttcagatcagttcctgtattttcagatctggctctctctgtggttgtggtggtagcagtggtagtggttatggagtctgtaagacttgccatttttaaaatgccgaaagctctcttcaggttaaatagtctctctgtgtgattctcaaatgaactccttgaggaagaatgttctgtgtgtatctagaaaccttagttctacaagaatgagagctaaagaagctcacccatgtcccacagaaaccacttcttccctttcctgaacaagaaaccgatgttcttcatctactgtctgtccacccaggcttggaagacaggtgaaaacaatcccatctttctattcctagaaagaggtagggatgtgatgcttacattcccctggcttttacttgcatcaaatgtgggaggaaggaataaaagagaagaggaaactaaaacctgagaaagggcaagaagagaaagtattaggttgatgcaaaagtaattgtggtttttgcaattacttttaatagcgaatccccgccccccaaaatcatctagcaatctgccctctggagtgaacttgaataaaagtaggtaatagtaccactcttggcttagaagtatctgattatccctactaaccagtacaagacatagatttctgaaggaaaaggatgcctaccattggctcttttttgtttttgtagtttgatttttcttattttttaaaaggttctaaaaataatacatatatacctggtagaaaatttgaaacttagaaagaagttaaaagaagcctacaaaatatcaccgcatcatattatcttattagccaaatgcaaccaccactaccatccagggagggttcttgccagtattttctctattttttcgtatgcttttaaaaatcttcacaactaaaatcattctgtgcacagaatttcacatactactttttattcaatcaaaaatattttctcatgtgtttattaattctttaaatattattttaatggcagtataatttgccatcatatgactatattataatttattaataattttcctaataaaggacattcagagtgtttagaattttagccattataaatagtattaaataaacatggtttttgtgtgcattaatctttactttttaaattatttccttagaataatctactggaagtaggattaccaaatcaaagagtatcatcattttcaagactttagtacctatcgccaagaaagctgtatcaatttatattcacagtatattaatgtctttctgaaactgactgaattgattaatgtcatttaaaaatcatgctatcttgttaggcctctgatactttgtatttactggtaaggctgaaaattgtttacagactaatgaaacacattatatattaaggttatttattttgtgccttaatatttgaaaaaatacatcttcttatcagtttgctttttgtcctttttgctgattgtttatgatcttttttgacatacaaaaattttatttttctctatatttcaatgtattgaactttgtattctgtaatttcttctattactgtaaagtagagaaaatctgcctgtatctagataaatatgcagaaatacattctcgttatttaattaatttttcaaaaatatttcttgaatttatctaggatttgttatacggcgtgaaaaaaatttatttttctctgataagctaaaaatcatcatgcacaatttattactttttccccacagcttatatatgtattctattgacacatatgcaagattctttttacatatgcgagattatgttttggggttttctttcagcactttactgatctctttgcctattcatttatcagtagtttctccatccctagtccttttctttctttttttctttcttttttttctaaagttcttttaactattcttatttctttcaacttaaaaggtggccaagatgacataccagaaggctgtctaaaattattggagaaagagaatctttgcctttaaagttttaggtcttaggtgaaaacgatgcagtgttagctcttgtgtctataaagggtggggttcatgctatgacacagaaaatcagaaaggactttcttgacatttgtagaaacagtaatataaagaagaattaggtaccttttggttcatcttaagtaaagaaaatttccagtgaggagattgagacatttaatgttaaaaagatcctctctcttctagggcacgagtaaagatatcaacccatctatctgtagaaaattgccagaaactgtcacaaaataaaaaatgagagaaggcctgaattacgacagtcctggtggggttctacaaggtgtgtgccaaataattttgttttctttttaaggcttgttaacagtggatagcttaaggtgatggggttataggtgatttttttcttgtccttatttaactgtattttcttttcttttttttttttttttgtcaaatggtataaaagctttttttcttaataatggcctgttaattaacatctagaacccagtactggaagcattagtcccaagaagtgcaaagttacaaaaagtggattttctatttcttcacctcttaccttaatagacacagaaacactaaaactcatctcattagaagaggttttgtgaaaatgagacaggacatagctaaaccaagtgcttttcctccgaataagatttcacccaaaatgaggttggggactggatgaagttatgaaaaaactactccttaaaactgctatttctaaagctaataggaattcttttgtagtgggcttttttcccttgacaaccaacgactgatacatcttgcatgttaaaaagcagagggctataagtaagttttcagtggaaataattttttttccctgcaccttccctttttgtgatacagttggcactattttactgtcttaaagattcccattttactttaatggtctctactttccccttttcttagctcttcttaatttttatgcttttcattagtagataattctctctggctgaccaacggggatgagggtcagagtcacgggcaatatactatatctgcgttagtctggcttgagaacagcgaaaccgtgcctccttctctaattagtcactttaagtatcagtgatgggcagtctctgtgacaatgattttgtcatagtaagcacttgaaatacctgctgcagttttttcaccacccccctcctccccgtttcaatcaggcaagtttatctttgttctttaaaccataagcaggtttttgtattttttttttttttttttttgcatgccacattgaaaagaaataaaaaccaagtgccatacatgtcaattaaaggcataaacaattaagagatagtccatttcccccttgaatctttcatgcttattttcccttcttagaataacacttaaaagccatcgaagcttcaacgggaccagtgtctccccgtttcgtggggtgtagagcaaggtgtgggaggagcgtttggcatgtcaagtctctgctctacagtggatctccacgtcccggcttccagtggacagccctgtgagatggggaaaatttccttccgctcagatactgtcaaggccaatgtgcctttcaggagattgtctgagagatttcgaacattgaaactgtaaaaaaaattgagctggacagatccttgccaccactttttctgctaaatatagaaaagttgtcatcgggttgcacaagcaatttccagctacagcacctcaggaggggaggcgggctcctgtctctcatagttaaagtgcatagagctgagccgaccctgactcacgggttgtgaggaacatgggaaggtggtagaagagtaatgagagaaaggcgtccttgttttggttaaatataatgacatgggaagatgtgcagttgatgatggtatttgcttacaatgtcataaagcatcaataatttgcaagaaaagggtagaaggagccctaccccaggagtctgtgctcagagtttctcccctatcattgctttggaaaacactgttgtatcgtggagggagactgtgagatatggagccaaacaggcatgggttggcatcccagctttatcacttaccctttgtttgatttggagttaattacttaacttctctgagcctgagagtcctcatatagaagatgtgggtaaaataatattcctctcgcagcatcactaggattcatgtgaggagtaaagtacatggcactactaagtgctcagcatttgttggcgcccttccccttctccccttttaggcaaatcatttaagccccctggacatcagttgcatctctcttagcaagtcctattggttctacctccggaatatatttagaatttatccacttctctctattgtcattgctgccatgtcagtccaacgtgtaggccgttgcgatgccttcctaactggttttcctccttctgtttttaaacccagtgcaatccatctccacatagcaggcagagagggcattttaaaaatgtaaatcacatcatgcccctaccctgcctaaaaccctcccgtggctgaacttagagtaaaatccaagctcctcaccacagccttcaaaggcccatgtgatcaagcccctgcctaccgctttccttttagactccacttgctactgcttttttcttctataaaattttttttttccggttgtactggcccttttcagtttccagaacactccaagtttatttctaccgcagggccttttaatttgctgtttccatggcttggaagatgcttcttctagattctcctgtgcttgaaaccttctcctaggtcaaatgttccctcctaaaatttgtcatccttgacctagtcactctctatcacagccctaatttattttcttcatagcacttgtcactatgtgaaagtatcttaaatactgtttatctgtttattttctgttttcccccatgagaatgtgagctccaggaaaaaaggggactatgcttttctcttcttttaattttttttgagacagaatctcgctctattgcccaggtggtagttcagtggcgtgatctcagctcactgtagccttgacctcctgggctcaagccatcctcccaccttaacctcctgagtagctggactacaggtgtgtacaaccatgcccagctaattttttgtatttttgtagagatggggtctcgccacattgcccaggatggtctcgaactcctggcctcaagtgactcgtctgcctcagcctcccaaagtgctgggattacaggcaagagccaccacacctggtgtgggactatgcttttcattgctgagtaaacctagaacaatgcctgtacctaggaggcccttgggaagcatgtgaagaatggattctgaataaatacgtataatgggataaaaatatcgtcctgaaagttggtgactggatttgaaaaatctatgtcctttccatttctttttttttaagatggagtcttgctctgttgcccagactggagtgcaatggcacaatctcagctccctgcaacctccgcgtcctgggttcaagtgattctcctgcctcagcctctcgagtagctgggattacaggcatgtgccactatgcctggctaattttttgtatttttagtagagacggggtttcaccatgttggccgggctggtctcgaactcctgacctcaggtgatccgcccgcctcagcctcccaaagtgctgggattacaggcatgaaccaccacgcccagcttcctttccatttctaaagattctatgattccttggacagaaagactaaatcctgggataattttaaagaaacacaattagaaaattttcaaacactcaacatacagtaactcatattaagtttaccaagtagaggcacttcgggtatctgctttaataaaaaaaaaataaggacttatattttgcatgtcaagtatttgtatgtcaaaggatccttctaacccatttaaaaatttggtacctttaagtagcattgcgattctctgagcaaacctatttagagtttgcttagcatgccctttcttcacagatcttgaaaaggaaagtgaccccacaatataacacatctgctgaaagaagtggctcaggtgagctcgggctgtgtgaatagtatgtcctttagctcagggagtcattctttccactgtgctctgtgcacgtgagaccactgctggggccgtgctttaagagggacacggtaaagtggatcacatcccagggaagtaagtagaaaccaagtgaggagaaaaaaaaaagaagaaaatgggaatgcctaacttaaaaaggaggggatggtagagacctgatagttgtcaattactgggaccaaatctgaaaagacagatttggtgccattccgtgggacaaatttggaaccggtgagtagaagctactgaaaggcagagttggtccagtcagtgtaggacatttccaacagtctggcctcatacctaagtaaagccctgcttagaaatataatgagcagctgccttttctggatgttaaaatttcaggcaagtaaactgctagtcagctatgtccttcctacaaggattcctcttactgtagatgggtaacatgcacacttccgggaagctctcagtgaaatctcttcacactgctcggcatagtggttcacacctgtagtcccagtgctttgggaggctgaggtaggagaatcacttgagcccggaagttcaagaccagcctaggcaacaaaaaatttacaaaaaaaatttaaaaattagccaagtgtggtagtggcatgccagtagtccttgctactctaggtgctgaggtgagaggattgcttaagcctaggcattcagtgagctatgatcacgccattgcactccagcctgggcaacagagagagacactgtctttaaaaaataaatacaggctgggcccggtggcagccatttgggaggttgaggtcagtggattgcttgagcccaggagtttgagaccagcctgagcaacatggcgaaaccccacctcttttaaaaacgcaaaaattagttgggcctggtgaagtgcacctgtaatcccagctactcgggaggctgaggcatgagaattgcttgaatccggaaggcgaaggttgcagtgagccaagattgcgccactgcactccatcagcctgggcgacagagcgaaacttggtctcaaaacaaatacatacatacatacatgcacacattaagttaaattaaaaagaaatctttttatgtattctatgttggttaatattctttggtttgcatcaatagtgttctttctactctgtcatgtgtggaatatgataagtctgctattgctaatgacctaggcccagagaactttgaatttcaaaagttaacctagaatctcagagatccatggttttatattctgacttggaagcaagtcactggctatttcctattcgagagatttctaatctggaaggctgaaggaggctaccactcttcttggtgaacaatagtttgtgttccaagaataaccctgggtttgaggatagaagataagaagataaggctggagagtttaagagttgtattagatctccttttaatctgcagcctaggcactatgttattttctacctatgccttccagcaggggtggcttataactccaggcagaagctgaacctccttggcgacaccccctagcctgacccctcttttctccttccttctttccttcctttgcctttcattagaattcctatgagcctttgaatgcttagcatgaaaatgagcccattttatttttggaacccacagaggcagccctgaggggagttattgtgttgcttttagcagctaaacaaaaaggtgtgaaatcatttgctggctgttctagaatgggaaaaaataaataaaaaactgagaaggaaggttcaggacagtgtgtggcagcttggacagaacctcgtgatgagggcttctctgagacttattagtaaccaaagtgactttgggaatgtctgtgcatttctctcaccttcccaggaagttactagaatagcacaggaagccactgggattaaaaaaaaaagattgattttgcaatactatttccatgttgccttgaaaaagacttgaggaggggactaatttgagaaaattccttaaagctctttgtaacatttcttatacaggcagcatgagggagaggagagaggactattttaccaagattttaagactttcaaacaaccagggaaggcttctgtggacaggtatgtgagtctttgacacaggcccctaattatttaaacacattaacagtggtaagagacaaaggcctcaaagaactcaagcaacaagaacttcttgtgaaacttgaggtttttgccccatgctaataacattcattgaaagtcgtctcctgttttggggggctgacggccccagatacgtctcttcttggaagaagattatattttgaaatgtctcttcattagaagggcaacttcattttcaattggaatctttgacatgggatttctctttttaaaaattatggaatatttttaaaacggcaaagtattaacgtgtaaacatgcagagacatggtaaactcatgtccttattcccaaattttcacatctgttttacatttagaccaatctatttgagctcatttcaaaagaaatgaaaggttatggttgtatccttcacatttccatgcctccttctctctcttcccaaagagacaaaccgtgttctgtggctggtgtgtgtcctccttcctggacttttaggaagtcctgaccaagtagccacttggcctaatgaacatgacctttggagtatttagggagcctgatttcagtggctggaggatctctccttgcgggggccaatcactgggcccgtcttatgaaggtggctaagccttctttttttcagtattcaaggccagaattacagtatagtaaaacaataggaaaaggcaatcctcctcaaagtactatttcgttaactgagtcatctatagaataaataatattgattttccctttattgccaggaagtatgccatgtgctgatatataatgagtcacagatgaacaagtagaaattaaaaacactgtaattccaaaatctctcttagggaaggaactgtcccggtttacaaaaattccatgataagctatgaccttgaggatatgagtggcaggaatcaagagactgttgggcgaggaggatcgtggcatgagggagggggaaggagagaaggaaggaggagaggaggaagtaggaatctcagggtgggagagagagaagatggatgagagtggcaaaaaggacaaaggagggagatgaaagggcatgtggcaaaatggctatgatgaaaaaaaaatctacagtggctcagctgctagaagattctaacaacaaggtcttgacagataaatttttttttttttttttttgaggcagagtctcactctgctggctcactgcaacctctgcctcctgggttcaagcaattctcctgcttctgcctcctgaatagctgggactacaggcatgcgccatcacgcctggctaatttttgtatttttttgtaaagacggggtttcaccgtgttgcccaggctggtctcgaactcctggcctcaagtgatccacccgcctcagcctcccaaagtgctgggattataggcatcagccaaggtgaccaatttccttacagatcaattagaagtcatttgtgttaatgtgaaggaagcccattatttactacccatcctcttcttcccactgcagtaaaatgttcagtgaaatagggtttttttttttttttaaaaaattaaggggctgatttcgttatatgttatcatacatatatacagcatatacatatacgtgccatatacacacagacgcatatacacacttctctatgtaaaagatatctggataaactgaaacaaatcagtaaaaagcagaaattccgcaccatatgtgagcatgaaaacacaacttcggggcctcgcccgtatgctctgaaagctaggaattctcagacaccctggcaaagtcttgaccttcatttggcattggaaaagtacattgagggacatctcaaaggacagggagagtttatttgtcaccagagttgagggccaagcttattgtttcatagttttccactgtaagttatagggaacatgatttgaatatgggggtaaactctgaagtcataatttatcaaacctctaccatagctgcccaaatgctctttttccttgcttccaactcgcaaactcttaattcatcttttcagattctatttaaatgtcaccttatctatggaaccttccctgattccccagggagggtaatttcctctcctgaacttctatatttctccagatatctctctattacagcctgtatcacataggatcacatgactttgaaccttaatacaaggtggacctcatggtatcacttttgaattcccattgcctagtgagacatgtgtcacttttgctgaataaaacccgggtatgtgaacaataaagagaaacttaaaagtgaatgcactgcttcagaaagaccagacttccaagcccccgaatggtggcaccactgtcccccaatacttttgttactacttgccatttgttttgccccttgttcctattttgaataagaacccattgctctccagaagtaaaagcaatgtgaccatttgtttatttactccctgcaccaagacccagggtgatgaggctggattgcacatggggcgtgggcatcagaaactggaaagtctcaccctgcccagcctgtctggctcgtatgcttgggcaagtcacatagctcctgtgggactccgtttcctcacccagtgataatgaccggcttcacagggtggctgcggagcttaattaaggattgagaaggaggcagaaaatacaaagtgcagcatacacgcaaatttcccatatttatttttgggctcagtaacctgttggtaggaggtgtttatgacctggaagaggagtctagcaagagatgtaactagctattctcattccaaaatggttcacttggtattgactgggaaatgggccatgtcattcttgcttttgttcgagtacattctgtggcccttcctgctaactttctgggtatagcttgccaactctaggcctcagttttcttgtataaggactttatctatctttcctttatgctcagatatgctgtgatggcttaagctttttccttagtgcttatacccttaagccgcactcagatagaagacagagggaaggcatacacgtttgtgagtgaccccatggggtagttccctgagccagaaaagacagagacttatgaagccctgcataggtgacacccgaaatctgcctggctttgcggatcctggcctttcttctaagtgcttggaagaccttggcagattcagccagcgttttgatcactgccagagcctgcagctttgttgctaattgtttgctgaatgaattgagcaaaagcacaactggtcccaaggcaggagtgaggaggtgagggaaagacagaaaaacaaaccagaagagaggactgggtgactgccttggaaaatcttattattactagtacatttttttgtcttttaatcacaaaggctgtctctgcactaggactaaagaaccagaactgttcagaaagagagaagagcccagcaccttatactcaggagatactgaaaaacatcatataaggtgtttactgttgagagaaaagtacacatcagaggatgcccattattgatatagagccttctctgtatctggatgaacgtgaccaggaagccaccctcagcctgctgcagctgttttcagaatctgtgggatcacaccccagaggcagttgggtcagccgcaggcatcaggtgaggaggaggaagagtgagacagctattacaggctgccggaccaggtggctgtgaagaggtgtggggacaccaaggcttatataaggaggatggagaacacaggccaaaggggaggctgtaatgctgacttcgattggctaacttaatataaggcagactgagggaggaggaggagggcaggagagaacacgctttagaaagcatgacggtgtctcattctgtttgcaagtgagcacgtaggtgccttccaaatatgatcctgaagaaggtgcagataaatgaaaaattggatatacaataaaccacatacctctttatgtttatatatgaacatattaaagaaggttggctttagtagagtatgatgcatattctaattatatcaatattggatgcattgttagtaccatttctcaacttcatttaaaaatcactttcagaaaatacaaaaaataattctgaagattttaaccttaggtgcccgtagatcattttcttaggaaactgcagcttttagaaatgctggacatactttatccaaagcgttataactggtcttccacaagcctaggataaagttttccacagaaacactactacagaaaaatgccacatgccatggattaaacactgaaaccagctaatcacaacacatgagagcaaatgtagcatgttcagagaagtacaaatatgttgaaacatgtctgtcatgaaatctgatcttaacaatcctctgaagactagcctttttgcaaagagaacttatgactaatatacctcacggagggggtctcagtttctaatagagttaattttatctgctttgatgatggaaacgaaagacaccctggaaacatcctcttaattctaagcaccatccactctttttgaggggggagagggaagctttcagtaattcccagtgtgtcttatactgaatatatagaagatggtaaagcagggccaggtaattccaacacttaaactgctacttaaccatccacatattaaaggagtttacatggattgtcagctatgaaagaggtttctcaatctatatcccactccacagtcaactctcctcacaggtgctcttggctgtggggcactcataatctcagaagccgataaggctgccaagttcaagttgccgtgactctgaacacagtataatattcccattccaagccatagcccgtcacttttgtggctgttcagatgagggcccttcttggtaccactctgactcacatacactggctgaagtcatgtagcaggtgaaggacttaagtgtcactaagttggtttccagttgcttccaggaaaaaaaaaaaaaatccccggcatataagattcttgctcctgacacctggcactttctccttgtgttcatggctgcagacagaagatctggccattactgttttggcttcaagtgctgcctcccacacacatattgaggggctctgcaacaaacagaaacctagggacactgacattttggaggcagggtgtagaaaaaaacactgtatgtgtatctgaaaactctgccatgcatgtcagccctgacacgccacttcctagctcttctaacgtcagaacattctgtgttaggagttgctaatcagtccaatatcatatgtagtttaacggtgttgaaacacatttgccagaaaggaggccaaaaggaagggcccctctactgctatcttctgcaaaagatctgatcacttgtgactgcagcccctcactttgcccccaggtgttttctccctgtgttgttcttgggcgtgtttaatttggattgagcatccatggagctgtgtaaacattgaggtcccatgaatattgcaatattaaacagcagtggtaattaccaatagacccctcaaaaagcaatcgaatagcaaactcaccttaacttggcctttgtatctctggcaacggaaagctcaaaatgcagttctgtcatttttgcacagtcatttaccttgacaccctccctctgccgtggaatcaaatctccatgtataaaaataaacctagaaactttctgttcacacgttttgaggtatgtgcaccaaatgacacactttgggaggtaagcacgagtcatggtaactgaccacatcctttatcttttcatcctaagacttagcagaactttatctttacaataaaatggcctttagaagtgggtatcaccaacttcagaatgtgaacatcgttactgagaaaaagcattttccttttaaacagaaaccaacagccatgcattaaaaggcctgaggaaaaaaaaaaaagtggagctaccacaaaacaaacaaatattcagcttggtttcaggaagcttagagaggatcaaacaaggctttctctattgaagttgttcgagaacatttatggttatttcagcttcagtttctatttacgctgctggcttttatgcctcgacctcaggagggcattccaacttcaggttaactcacaagtagcttcagaaaagttggcctgaaaatcccacccccagagtgggggaggggaaagcacgatggttcacattggtttccaaacacctttcaaaccactgctttggccttgagtcgaggatatctcaaaaattggggagagaaattccacggagagagggtgagaaaggtttctcatggtgtgaacattcatatagggagactgtctcttcctgcgggatgaaaccaggagaagagagcaccaatttgcggagccctcgtgaaggtttccactcaggagtttgcaattttctgttggtccctagggaggaagatttagtacatggttgaatttccaagcaaattaacttccagaataaaggaggaactatgccaaccctttgcaaacaatatttttgttttataaatctatttagttttcaattcttcgtgccatttatcctcataaccatgttttggttggtatttttaatccccttttgatggattaggaaattgaggtttagagattaagaaacaagcccaaagttatacaataaatacatagaaaagctaagattcaaacccgggtccttttgcctctaatgtccgagtcccttccaatacgccacacagcccctgaccactcccttccgttaacaatgcatattgtcagcggtggaaagaggaagaaacttttggagtagaatactgaacagttttgattagggagcggatgtgaggcagaggaaatattatcactttggtggttgttactatgtccccatcctttcatggaaacatatggaagttttctcttaaacgtacatgtcagaacttgccggtgaaatttaagtgacaccctgcatatggtgcaagttcatctccgagaagcaagagatgaaaaagccgctgtttccagatgtatcaaatctcatataaataccacacgttgcttgcctctggagaaggtctcagtaaggtttgtccagatttcaacatagagtattcctatttacatatgtcccgctgcatacatacttagctatgtcaatatccacttggcatactctggagcttagaaaaagtttcctgccgaagctgaacagcttcccttgattgctcctttgcaaaccttcatggttttttcattgtaacagatttttgattacacaaaacatgccactattctatggaacaaaatcaagctacatccctttacccaaccgcccttcccccataacatcaataccaaaaaggcttccactccagggggcttctgggagcattcccacaaaccacacagctttctgcaccctccttcagccccagtctttttaaaagttagtacaacatgtccataaaggccactctcccttgcagagttttgaacagccactttagccacctaaatctgagagagataaatttacaatccactttaggtttatgtggggaaccataaatatcaggcttgagccctgagggctagaatttcatgggccgttaagcatgtcaccaggtggaaagctgtcaatagctggatgtgagctacactgagataaccacaggggcctggcttaagaaagtgtagccctgatcaaagaggggtgtccttttaccttgttccatcactccactcaccaattctcccttcccgcctctgatctcaacctctccttcacttcctgttaggtgtcctctgtgctaggtagcagactgcctttttttttttttcctctagagtgaaaggttgggtgacatatggaaagaacaagagacgtgcagttctggcagaccttgatttaaatcctcgccctgctatttagtagctatgtaataatgcacaagttacttaacccaacttagctcatttttccaactgtgaaattattaaagataattaaaagcataagaaaggcataagtagggccaatgggtagagactgtaaaaaaacagattgcctacttagtagacagaagaactttctaaaagccagattggctcgaaaatagaatgggctgccttgaaaagaaatgaagaagtgaatattctctgtgacaggttttgcgcataagccggatgcagggtggtagatcccgagaatagacaggagtttagactggccactgcaaaggatttctaatcttgaaattccatggttctatgatttgcatatgtgtccttccagaaaagctaagataaatcttctcaaatcccctatgcggaagaaaagtaaattggcatcatattttttcattttcattttccttctagaaaactaatcccttccatgttttcccccttccctcaattagttggtagagaatcccatttccatcaagtgcacagaacacatttaaccattttgaaacacttaacatttaacacaaaccacatggccgtaagttttaattagttcccgctatacaaataggtccatttttagaaaaatcaaaatgctcaatgctggtgcttgctctcttcctctccattgtttctctgtttgactagctcagtggcactttcccatcctgccctcttgctgtctgagcccatggcacctgccaataaaagtgatgacaggctttgatgctcacacaggtttgcaacaacagagttcacttcataatcaccagacttcagcccgtaagcgtgatctgagtgacactggattttttacctgagatgttacgctgtgggctttcgtttctacaggttatgaaccactttgaaagtgatttttttagcttgctagggggaatgacctatgagcctgcagacaaatctcaactgattgggcaaagcccaaacccttattagagtgcttgagtttgctgggaaaactggctgccacatatgagccacagatacaaggtcgtcctttggcataatgtgtacaggtgcatgcgtgtgtgtgtgtgtgtgtgtgtgtgtgtgtgcgtatttgaacatgttcaggtcatgaagcaaatcagaagtacaaaccagtgtcttctgtttggccaaagtgaatatcaagggaaaccacagaagacaaagtgcactcgtacaacaaggagtgatgggagggctaagcctagggctcccgtcctcaccctcatcacaaagtgactgctatgaatgactgcatgttgattggccaggcatggaggaagcacatacttataccaacatgttatttattcggccagatattattatcttacttttacggataagactcaaaaagattaaataacctgcccacagccacattacttgtaggtggttgtgatggaagttgagcccatggtaatggacttttcatggcactgtctactttcagaggctttctcagctcagagtccgactgtgtctgcctctcaagccctgtttcagccaccttgtctcattttttttttactctgatatcatatttcctacaaatagtggccaaattcttccttctccatgttggctgtcttatttgcctaatgttatgatttgtgtttcagataccctagggtatcatgtttttcatcttttgagtgtccaaaactacaaacagctttagggtcaattaaaatctcaacaggagcaaggattctatcaggagaccctgacctttgcagccaacactttacatgaagaagcagcttctcttcttctcccgtgaaggccgcctctttagatagctgggatttagcatgcctgtcattttagtcaaaggagctgctgaataaagacttgttgaccaaagcttctcaccggctaaggacagagaagtcttatttcttctctttgcaaatgaagattccaatcttctcatcctgagacaggggtaatgcaactgttttgatttgtaccctaaaatgttccatggtacactgaactgttttcaaggtagagttttagaagaggccgatttatttttgaccttgacacaatttgaatttaacaaacatttttcccatatttcactttacacatttgtttgcactgaaactgcatgactagaataaagcattcaaaacaaagcaggcaagcaagcaagcaaacagaaacccatcccacttctcccttgctatgcaactaggcaagtagacccgaggctctctgagatttgaaatgctgtgttccttaacgcagtaaactgagtaatgtgtccccacccccactccccaatgtccacatcttaattcccggaacctacaaatatgttattttaggcaaaagggactttgcagctgtgattaaattaaggatctggagatggggagattattctggattatctgggtgggctcaatgtaatcacagggtccttataagaagtagacaagagggtgaaacacagaaggtgatgtgaccatggaagcagagggacagaagtagactggacgatgctacgtcgctgactttggagacagaggaaggagccatgagacaaggaatccaggtagcctctaaaactggaagtcgggaagcagatattcccctagagcctcctgaaggaactggctgagtgttagctcaataaaactgggtttgtacttctgatctctggaactttaagagaatagttttgcattgttttaagtcccgagtttgtggtattttgttataaaagccataggaaacgaatacacttgtttaccacttactgcatctcttatgtctagtattgggcttggtatatgagatggactcgtaaagtaatatttgttggatgcactgaaaatataagggaaagatgtcatgagaatggaatgtaccaaattcatggcaactttttaaatttttatttatttatttatttatttttgagacagagtctcactctgtcgccctcatggaaacttttctgatttaaaaaattctctctttcttaggatgaaagaaacattcctttaaggctcagaagggtgtacagttacccagatatccatggcaaggccccagcggttacagagttgtgtttgagcccttcaggcctagcaagctctttcctgggagcaagtaaaggagacataggccatgataaacagcacttagcggccaattgctttaagaatacctgtttagtgtttccagggactcaaagctccagggggacaagcaggaaggagaggcagtgtcaattactgtacaatacaattagcaaataccagcaccttgaggaatgtttggtatacagtaggcagtcaggaagcaaatgctagaatgaatgtcattcagagcgtgtgacccctttctcctaaagcttcctacagtagaagtcagtctcctactacttctaccttctctgtctctttggatgttcattttcgtcggattttactcatacctgctgaagaagggcaaaggggagtacctttcaacctcagacacagacacatgtatttgtcaacaggccacacatattctgggcacagggactgcagaccatagcaacgtacctcaccttttctgagaccctcatccttgttcagtatttgtaagccttttaatttaaagaaaaataaattaagccatgctagctgattaaagaataatttcaaggaatttaacacttagtgattatattagcgatgtacaataacttctcactttggattctttttgatgtattatggaggtaaaaatcaatattttctaccaaactggagaaatttagatgatctatttttgagatataggttcagagaaaaattgatgataaagactggaataactctagttcccccaagtcaacatctgattggcccttagaatcagaatttaggaagagagaggtttgggagaccacgcagtcctgcttcctcacttcgcagatacggaaaccaggcctagctggaatttccccagatcacacagccaggaaacagcaggctcaaaactagggccttctgagtccccagtgcagcatgcatatgtgtctgccttgtttcattatgtaatggtacagcgagtttggaggcatacaaaaacagacagacaccaatcttgccttcaaggcgtttacaatttagcaggggagataacacatgtatataaaaaacttactagacaaagtaaacagcagtatgctctataagacaggtatggattaaaaaggaatctttaagtcattgaaccctgagattctttttttttcattttttaaaacaatagtaatcaaacttgtgaaatagtgaacttcctccattttgcaagattcctcgaaaccaagtacttggaatataacttagttaaggattgcacaacacacaccatttgagtatctgatttggaaaactaagccacagagccagaccacacaatgcacactggttggaatctgctgggcaggtatctccccgtctgtccaggcaagccaaatcaaataaggccctgagttaaaaaggaaggaaaagtaacagataaatctgttgaccaccactctaggaggccaaggcctctttcctccccattagtggtggcttgctctaagataaaaataccacacttaagctgtgatagaggaaagcccgtggtttgggacccaactacaaagtaacagcaaaagagagattattactccctagtgactctctttttggtataattagaagaatagaaagaccactgaagagtgggatttgtgagaaatatgggtcatgtgtctgcagcactagttgcttgcagaattggctatgtgggttggcacacagcaccgtgaatattagaaaccacaaatctccagggtttcttgaacaaagtaaaaggccttgtcttcagattgccaggttggaggctggcttgtggaagaagcccctgggtgagctccaaagctacctacgcatttctgccttctccgtctctttcttctcctcctcctctccctctccccatccctctcctcttattttggatattgcatcttggtgggtctaactgtagctttgcttatgccaatacccccctgccccaccccctggggaagcaggccctctccatgacaactgccgacgcagaatccacagagctctggacaatgggacaaaccatatttctatgaacaaagccaaggtaagtggattcctttgcccctggaggactaaaggagttactccccagtcagattatgctgtaattgagggtccagaaaaggaatgaacttccctgtgtagacaacagagccagttcttaaaaagctatgccagcgtgcagaccctttagaatctcctccttgggagcctgaaatggaaacaaagtacttccctgtgttcacctgtccaatcgttgactcctctgcagaattattctcttgggttgtaagtaagctaagtcttctataaggcatacttcaagaaaaaaaggaaaacataaaatgagtttataaaatcctaaggattaactataccttggacacagataaattgccacgtttatcactgcacttccctttatctcctcctgagatgctctctcggttcctccttcactgctcttcaggttctggaatatttcttagccaacacttcatccacggtgacttccaggacccccagtgaggggtggggattcctatgttgtctcttttcttggcctctccatccaaaatatttagatggtgcattcgtggcctttctctctctctaccactgcctcctccaaaaaaaggaaaagcggggagtggcgggtggaaggagattacatttttctttctttttttcttttttttttggagatggagtcttgctctgttgtccaggctggagtgcagtggcgtgatctcggatcactgcagcctctgcctcctgggttccagtgattctcctgcctcagcctcctgagtaggtgggatcacaggtgtgcaccatcacgcccagctagtttcatcatgttggccaggctggtctcaaactcctgacctcaagtgatccgcccacctcagcctctgaaagtgctgggattacaggcatgagccactgtgcctggcccattttcttctcttatccttggtgctttccatatagtaggaggtcagggagatcaaggggattcctggatgcataaataaaatctgcatttcttaggaatctgatggacaagagaatccagaatctctgcaatgggcagaagagaggaccagacttcatggttgatctccccacagaccataccaacagggcaaagcccttctgtatgtatttctgttttcacatgtatctgcacaaccacgtgtttagaaatcagagggttgctatttgtaaaactcttgaaaacctctcttttaaattgtaaaaattatttaataaatgccaacccaatctactttatctcagtgagctgctattaagtgcaaagaagataacatgttacaggtaagtctgtgcttaaagagctttggccacaaagactaaacagggtccgttctcccatgtgaaggaaaatgtttctatttcaattgtgatgtttggaatttcaccttaaagtagaaaaaaggcactgtttctgtagtgccttttggaaaggcactgtagaagtggctgatggtccttgtggaatcagctggccaagtgtttcctcctttctacctagactgtcattggagtatattgacccatccctgacagaaagtctgtgtaagcccgaggaggaggaacatgccgcaaacctgctgcagagcattaacaagaacagaattaaaaaggatcacttctgggactcatcacacaacttggaaatcatgttcaataaaagaaaagataatttggggccacactacctgaaatgaacatctgacactcagtcactggtctggatttagaaaactgctttgatccccggagggaagattgttaatgagtattttaaaggacaagattggcgaagcatgatagagtggaaaagggtactgattttgaagggtcccagtcttgcttccacttctgtaagcaagtagaactgactttgaacaagacacattacactgccctgagaaaacgtcctcatctctaacatgggaggtgaagttaaccctctagtccatccaacaatcaaatctaggccttaatgactatgaaaacatgggaaaaaatttaaaacaagagcaggtaatgcttgcaccttttcgctacctgaaaggaaggtcagacaaccttagtataaaaggtaacttttcttacttgcatgctaacaatcaatgcataatttacatagcaatgcatacactttatatagttcaagagatcatcgttgactgcctgaacttgatatgcttcatccttgtcatgtcctcctcactaaatactaactacccaaagtgatcaaaccccaaatgtaaaaataatcatctgataaatcacagacaacaaggaggtgaaaaaaagaactcagtcaaacatttttgagttcataaaaaaattgaatagcataatctaccactatgttcccatccccctgctaaaacaatattttatcactctggctttatttattcccagtcctccccaacatacttattttctggagcattttaaagtaaatcttggatatcttgtcatttcatccacaactacttcagtcttcatctcaactaataaggattttttaaaaaccactaccacgacagtattatgcctgacaatattaaaaaattatttactatcatctaaagaaccaatcaatattcaaatttcatcaatcatctaaaaatttttttttctttcagtttttggcttgaattagcatctaaacaagctaagaggtgaaactgatttcacccaattcacaatcctttgtcttttaaatatttcttttagacgctgacattacttagacacaatgtatctggaacacagataatgtgaaggtcagcttcatcgcaatattatttgaaatgtcttattctatgaatcagatataaatgtagttaaaggctcagaactggaaaaatctcaagtaattctcagttttcccaaatgcataaatgatttaggcaaccttaatggaatgctttaaagatattttgctaaatcttacaccattcctaggaagaatacctctgacagactttagcagcttttattttgcccatataaaagctggatttcttagaccgtggagcagcctaacagcacagatagtattttcagttgtagtttcacctgcaccttaaaaagaaatctacctgcatatgctggcaacgaggacatctttgaaaacagagctaagagcctcaaactgtcaactccgacttttgggaagaagggaggtgaacagtttctccattcagcttccatgaggcctctctggtaacacacaggcactgctgtgactcataaccagaaatactgttttataacaccagtctgtgttttgtaacacacactgaaagaaaaaaaaaactatttagaaaccaaaaccaagccctacatctgggcattggtatcaagatctcaagatgtcagagtggctatttaattcagataaagtaggcaagtccttatccctttccttggcaagaaagtggaggcttcctgcctgctgcacatgcccacaggaggagcaaccatgaatttaattttcttaaaacagaagcattttcagacttgtgttttcctggacagctgcctagtggctgtaatccataataagggcgtgtaattgacagtaatgtgaatcactcactgaaattctggcaaaaaaaaaaaatagaggagttattttttttttttttcaggaaaaaattaaagagcagattcatcctgtccattgaaaatagcaattactttacatttcagctcattagctacctttatataaaaaaatcactgtaatttgtactaactatcagcaagtgttgtaaagaagtggtgcagttgcacaaggcatgcaatcggatgtgctgggccaggcacaatctgtaaaatggcaaatgtagatgagttacttgatatagcatacatgggattcctggcccaagagtgagttacaggacactgtcctaacagtgattttgccacttaaaaagctgctatctgcctgggaccttgtaattattatggtaatacccagggcagactgatcaagctgccattgatgtctatgggcagtttcagaattcctttcactcagacacagggatctccaaaagaatggttggggattttcccaggtagaagctgttggaaccatggaaactttgagaccaggtaaagggtttctcccatctattaattctctttgaataaggggaagaataatctcaattaacttcactatcaacctgaaagggccccctcttttccaaggcagaggcacgggaactaaacactggaaagctacggaagatttaattccatttagataaaccctgactccatcagaacccgagaggttcagatatttttctgaaacttcagcacctgtgaaactagcagcccttgtccagaactacctggtatctcaagcttctggtcccagagggaacaggggtattttgacttgtgaaaatcccacgaatgcatggagaaaaacttgggactttagaatgctgaggtctgtgttaggaagatgtatattgaaccaaagagtggaaacacttaacctctttttctcagtcaaccacactctatgaagaaggcttggatttattttctcctattgggatctcccattcttagaagaaaaatggaagtcagatttcattaaaatagaggtaatgttgggattttgatgaatgaaactaaaattcattttgtgctttatcattaattatttctgagaagctttttctcatatgacaacagttgggggatggtattattagcttatgatggttcccatctttgatagccaccactaatctcctacttaattctggcttaatttgcaagtagttgctaacaggcaaaatgagggtggagtctcataaaccactaaaaagagagacttgctatgcatataaataggccctgcaaaaatatttcagatactgtatctcaattattagacagtagcaaactgtcaaaatctaaaaagtaacatggaatatgtataactagttctttgcaggcattctttttgttcctatatgaatacattttatgtgagcccaaatggttggaaatgtattattcatttttataattgagaaaaatgtgttaacgctctggaatgtccatgtgtggaaaaataaaacgttatatggaattgcacacacatatgatttataatgcatgcttccaggaccagaaatcctaacgaagaaccttattcaacagaaaaaaacatttttttttcttcagtatgtgcaattctggtatactgtaatgctgaggccaagcatatattttattagtttaaatcctagctaagcaataaaatatgtgtcattttaaataaaagaaaacatgtttttcacaaaagctagatttcttgtccatttttgtccccctgtagtggatgctgtggtgtgctgcataggtccctccctttaggatggaggccctcattcccctggggccctgagtgttgactgccagtggctcatagctgaattgcttcctgagatttgtccttagctaaagtggagctgccttgcccaaggttatgcccttaggtgcagctggcacccaatggctgcctgatgcagagtaaaagatgcagcccccttgcttcaatttggtacatcactgaagggccacccccactctgatctccctgtggcatctgctgaagcctatattgcaactgttcaagttttccttctgcccagtccagcttccctcactctctataggcattgtccctataagcacactcccataaactttctgtatgacaatttcagaatctgagcatctattctctggggaattcaatctaagataccttcgtttatttaaggatactttagtggagtgattagctgggcgtaatgatgaattttagatcagaatatggtagaacttcactttcttcaatgtgagatagacccaacttagcctttatgccaagagggttagttccagaagtttttaaaaaactctagcattgcaaggtgagctaaattaatggtaatggtacaaaatgagactttttttgttgttgctgttacggagtttcactcttgttgcccaggctggagtgcaatgacgcgatgttggctcactgcaacctctgcctcccaggttcgagtgattatcttgcctcagccccccaagtagttgggatcacaggcatacgccaccatacccggctaattttgtgtttttagtagagatggggtttcaccatgttggtcaggctgatcttgacctcctgacctcaggtgattcacccacctcagcctcccaaagtgctgggattacagacatgagccaccacacctggccacaatatgagaaattttataatgaggctttgctattgaaaataatagaagaatcatgtacgatatgtagatgattggtcacacacagaatgtgagaagttggctcttctacatttcagtggcataattaacccaactctccagaattcttgtaagtaagactctgggatagaacgaggaagaactcactgaccactaaagagtaggtaaagcactaggaaaatctgtgagaatgagtcccatattggtcattttgttcattagaaatctaacctaagagaaacgtatcaacagaatctcaggtgaagcaatttagggcaataaaaacatattctcctaaatgatactgtccctgagtggctcccctagtgaaaatgagaacatcttcctgtctctcaaatcaccccaattatacacaggattaggtaacttccacaaatcaggccatggaaagttctttgatttagagataccaggcaggactcttttttgaggggtgtgggagcaggaggagaggaggatggtggtgaggatgtgtgtgtgatagtaacagtttttccttttccaacatcaaaaaccataggccttctaggacagcttctactttgattgcacttggctgtgtgaaagagcagcacaaaatgaagatagctcctctcactgtgctattaaagactcccatctgagaaagaaaatgggtgaaggaggctataagagatggcctttctatcaaaaaatcaacttcagaagcctaaaagatcttcttccttcatcctgttctcatttagcttgctaatagacgcctcatgagaaaagaattattgtgaagctgagaaagtaagatttaaatttcctaagaagagatggactttacgttacaggcaagggacatttttttctctttttacaataattccaaagtgctttttgaccttggaagaagaaaatcagtgttaagatagaattggttaggtcatcgcctaaggaggcataaaaggccaccaggaaataaattaaaattaaaatagattcttttattgggtcacatctcatcctctcatttatgagcaaggcttccactcaagcaattgatactgcaggggataattttgctcctcttgttttgactcaagaaaaagttacaaacaaaagtagggaggaagctgcatatgaaggctaaaggacatttttaaaagaattccaaggaaaagagcacagaaactgtggttgtgtgcagccactgatgaggtggacaatagttttgaaattattggttcctgctaaactaaggaaacatacttacattctagaccagacaaacatagcaagtcacgtgttctgaccttgaacaaataaatgtcatttctttccagaatttaccttaaaattcaataagtaatctgggattatcaggacatctacttcagaaactgttaaacattttaggattactttttcttctctagactggacaaatacaggatatttcccttgataggatacacccttcattcttggaaaggtcagccaattctcttttctagtaggtagtttcctactttgcataaatgtagatgccaatggtaactgaaaatggtccctttaccttttactctatagattcgatcatctgatttacatggataatgcaaacaaatggtgttcaagaggtcactcagaaaattaacacattcttcatatctagaaagataggcaagtatttttaaacctctcgataagattctgacttaaatcttacaaactgcagaaagaaactttaaagctatcagccctaaaatttagccctaatactgagactcaaaatgcatatggtaaattgccagatgtcaagcagccctttgaattatagtatcagtttccaaactattataatgcaaatctcacaatataatttcaagtaataaatacctattctttctttcttttcttttttttgagactgagtctcgctgtgcagtggtgtgatctcagctcactgcaacctccatctcccgggttcaagcaattctcgtgcctcagcctccctagtagctgagattacaggcgcctgtcaccatgcccggctaatttttgtatttttagtaaagacggggtttccccatgttggccgggctggtctcgaactcctgacctccagtgatctgtgtgccttggcctcgccaagtgctaggattacaggtgtgagccactgtacccagcctattctttcttatagctgttaacaatgaaaatatcattatttttggccaaactgaaatgagcaacaagagtggtcataaaattgtgtatgtatacacacacatacagacacacttatttaaaatctacgggtattaattgagcacatagtagatactgatcactctgttaagcccaagggatacaaagataatttttttttttttttttttgaaacagggtcttgctctgtagtctagtctagagtgcagtggtgcactctctgctaactgtagtcttgacttcctgggctcaagcaatcctcccagctcagtctcccaagtagctggaactataggtgtgtgccagcatgcatagctacttaatttctttcttttttttttttttttttttgtagatacctggtctccctatgttttccaggctgttcttgaactcctggactcagcaatcccccctcctcagcctcccaaagtgctgggactacaggcatgagccaccacacccggccaaaaaaattaaagaatatctagtaggacaaagctacataaacagcaactattctgcaatacattttatactgtcaccttaagaatgtactgtgggggctgcagcaattaacaaggtggaattggagaaggctttgcacggcagatgctacttgtgttggcctttgatggagcaataagactttataggtgcagaagatgatgaaggacattccaggacaaacaagatactacagatacaaaggcaccgaggtatgcccatgcatggaatctcctgggaacagatcactgaggatggcaaacactgcctgcatgggagaagtcctgaaaagagcagtggaaagattaagaccagattgtaaaaggcctcgaatgccatacttagaatttagactcctcaggtgacagaaaaccttacaggaggttgaatgagaagattccaccttgtttctaaggaggtagaatcagaagattctagagaaggccacagtcaaattctagagaaagccacagtttttctttttccttacttttcttttttattgtgcaggagcaggaattaccgaatgtaaggctggtgttttctaatatacctcatctcagagaatagaatttagccaagacagatttttatcacactcttagcacacagtgagtcttggtaccactagacaagactgggctctcttccctaaaagattcacaatcgtccctcttactgttggtgttctgttgtattcacactgcaaagcaaaacaagtgccaagccacaccttgagttctctgctctgcaggtttactgcctgacaagccttaaagttagaaaaatatttcaagctgaatctgtcactaacaactttatatggtttgttgtttcctgtgttgcttgttgagaatgcctggccactgagaaacgaaatcggaggcagatatttctgacagcgagcctccctgccgggtgctttatcattctttatgttaaatacatcaccacatctaagcccttgcaagccgagaagttaaggttatggtgtggacaataaaaaaccgatttttctcctaattgcctacatgtattagaagtttttgaatttatacaggccattggtagcagagagtatagttcgttttttgtttctttttgtttttgtttttgagacagggtctcactctgtcacccaggctggagtgcagtggtgtgatcatagcttgcggcagctttaaactcctgggctcaagcaatctttccacctcagcatcctgagtagctgggactataggcatgcacccccatacccagctaattttctttttattttttggtggagatggggttttgccacgtgcccaggctggttttgaactctgtggctcaagtgctctacctgcctcagcctcccaaagtgctgggtttacaggcatgagccactgcacccagcccaaagagtatgattctattttttttttttaaatttaattcctcttcatgacagtctcttgtggcaggaaagtggttagtttatagatagaagaaatctaggaccaaagagatgaaataattggaaatcattgttttgatagagtcaggggcagagtttgtgacagcatgacagcagcattccttggctgctgctctcagggggaagccctacagccttgtttccactgcagacttaactgtcctcactccacgtagatcagttcgattcctgagcccgaatgacaagttgaactaccaataatgccttgcacaatgtttgaagcgacataatcagccggagagggacttgtgtcagttagattttgtctccttaaaaatcaagagcaagagtggtaagagagaagttttttaacaaggaggaaaaccctagacagttgtctctaaggttcttcaccacagcttcaaggacaaccaggaaaagagctgctatttgaggcaacttcattataaaatcatttttaataagcaatcttaacaaagagagggaatactcttgtggagaaaccctccagggacccagaggctgcccagttaagttattaggaagtttcacacaagggaccaaacagctatttcattggcctcgggggacagagtttagttttcacctgttctctagaggcactggtgttatcctgtctactaacagcagagactggtaacaatcaattatcccgacgccccaacctggtgagggaaagtgaattttcagttttgtcgacacaaaaagacatggtgtaagagaaagagagataaattaactcaatatgattcattatactggagactaagaacacgcagccaatgaaaatgcctcatcaggaccttggtattctttaagtaaaacgacagaaacatattctaaggaaattaagaaatatccataatgagaaaaggatgcttagttgtcctcttaccataattgtccagctacatgagggaaataattctttgtgctgatgaaaaagtaatagtcactgcagttgactttgcctacctaaggagtgagcaaggtttggaatttggggtttaaatttttataaagctatttgtagctgagtttaaaagggttggaaagacagaggctcccagggtagcagagtagcctgcagccaattagcagctcgaatgaaagaaagcaaggagaaccattagccgcaaaattcaaagtgcttatgtatttttcaagtttcactgcacattccatgcctctgattttaatgaaatggcaagaacgggtcttacaattagaccttaacaccgtggagttagagaaaaagtgaacatcctttttctttaataatcagaagagccttctcttttcggaccagatctctccttcccaataagcgtttttttgtttgtttgtttgtttgtttgtttgtttgtttttttaacgtagttggtcacaggagcacacacagaagtagttctaactaaggataaaaatgtcacctgggttcagagaagggactggagcagggaacatctgattcacataaccctaactaaatgactgtggcagaaaaacattgtttataggtcactgctttttttcacacacattctgtggctccacattggttatgagagaaagccaaaacctgctctctgttcttactggtctcccttttccttgttaatactctactccagtcagaccgatctacacaatcatccctgatcacacctaattcttgctacccttccagagcaagctcagctcaccacacatgttcccaactcatacagcatttaaacacatattctattaggttggtgcaaaagtaattgtggtttttgccattgaaatggcaaaatttcatagccctgcattttcctgcaattctttcattactgaaagttcctcaaatgtgtgtgtcctttctcctagatacagactaaactattagacagggaggaatataagttagattacctatactgcaatgtgccttacacaatgttaggcacagagcaggggttaaaaaatatcaagctaagaaaatctgcctggctccctgccctatctttccataggtatgaactgcagtctactttccagcctctgttcctcagaccccgatattacaggtgtctggattgcctagcatataatttccttcccctttcctctaagaagaaaatgtaaaataaaagatttatagattaaggcctttccactgaatccaaaccttaatctagtatatcctacctcttttttttttttctttttttttttttgagatggagtcccactacattgcccaggttggggtgcagtgctgtgatctcagcttactgccgcttcggcatcccaggttcaagcgattatcctgcctcagcctccctagtagctgggattacaggtgcacagtaccacactcagctactttttgtatttttagttaagatggggtttcaccatgttggccaggctagtctcaaactcttgaccttcagtgatccgcccgtctcggcctcccaaagtgctgggattacaagcgtgagccaccatgcccggccactcctcaatatgccttctaatcagtatccttggctattaactatttaagacagtaggagctggagttgatgcctaggagacatacaaaatcaagaagggaaagagctatcactcctacatagaaaaacatgttttcccagaagtggaagtggattgggtggagaacattccattgcaagggattttggcagtcaaaggaaaatatttaattgaatagcttaaaaatcttcatccttataatgtatagatgtggatgtcaattataatccaaagggccatgtgactacaaatgcactaacttcctggccacagaattgataaagaaatcagtgtaaaaaatttagtgtcatcactgaaagtgaatgtagagtgatcactctcttcttgttttaaacacattggcatctctgtttcttctacgtttttattcctctgcgtacagattgcaataaaaagagaagctgatataagtgtaaatccagtcctaagttcagatatgcttaaacatcctcaaaatctagatgttaattttcttatatctcctatatatcccattgatatatatatatatatatatatatatatatctgtttcctgagcgttctgttagcttccagggtttttttgggtttggataggtttcaaagaaaccactgtgtccggaatcatagtactgctttgtggcaatgaaagttataaatgaattactaagttggtctaacaaaaaagtataaatttattataaatgtcattaatgtccgttaaaggctttgtttcagaggaagatgggtttgtgctgtacgaaatatatgtcattactggtgtggggtacatagctgtcctagaagcagaagtaaccactttgaacaattgttttattatggaatcagttgtgttgtatgacattaagtagacatcagttctttgatgaactaagttaaattgttaaaaagataagtaatggtcatttaaagtaagaaggttggctaggcgcagtggctcacgcctgtaatcccagcactttgggaggctgaggcaggaggatctcttgagctaaagagttcagagaccagcctgggcaacatagcaagactctgtctctctcttttttttctttttgagacagactctcactccatcacccaggctggagtgcagtggcgtgatctcggctcactgcaacctctgcctcccgggttcaagtgattctcatgcctcagcctcccaagtagctgagattacaggcgtgtgccaccactcctgactaatttttgtatttttagtagcgatggagtttcaccatgttggccaggctggtctcaaactcctgacctcaggtgatctgcctgcctcggcctcccaaagtgctgggattacaggggtgagccaccaagcccagccagcaagaccctgtctctacaaaaaactaaaaataaaaaacaaattagctgagcaagtcccagctacttgggaagctgaggcaggaggatctcctgagaccaagaggttgaggctgcagtgagccacgcgcatgccactacactcccgcttggccaacagagcgagtccccttctaaaaaaaataataaagtaagaacgctgtacagtttccagtagactactttgtttaaatactttttttcacatagtgggaataacattcccctttcttacaatcagtttgttcttcaagcttagaagcctatggaggtagcatagttgtaaggtaaaaggaaaccttggtcaattgtaagaatgactatgttgcacttggctttcttcctatactttagagtggaagaaccactctgaaaaatgaagctcttcattttaaaagcatttaaactggggattgcctttacatcctggctccaccacatactagctagttgtaggaccctggacctcggttttcatctgtaaagtggggatagtagcaacacctacctcacaaagttgcagtaaagataaataaatgaacacttagaaagtgcttagagaagtgcctagcactcagtgccccacaagtattagttaatgttgatactggagataacggtgtggctcttatgtgtgcacaagggggcaatctactctgttttgactccaggctttgcccagctgggtgagctaacgaggtttttcacttctctaagctacttgtctctcatgtacattttcttatttaaaatgcgggtgcaagcagtacaaagctcctaaagctgatgagcagattaaatgaaataatgcacgtaaagcattaaacacaatgcttcgaatattcagattgcttggtaggtggtgttcctgctattgctgctgctgctactacaagtaatggtactactgctattacttctgccattattactgtcaatatgaaactaagcatattgcaaacttatgtcatagacatctagcgctttttaaaaaatcaatctaatcatgtctaactaagcatttatcaagtatgtaataagtctatcaagtccacaccaatccctcgtaggctaggcatgtttgttttctccctggtagtgattatggattttaaagagccaatcaccatctcaacacaccctttggaacgtatgttatgaagtgggaatacaaatactttttgtccaaatgcaattcatgaacctcaagtctactaactgggcaaacttgaatcaactggatgttgggatggaaatgctcaggtaactattcagtttttctatggagttcacaggtcctcgccatgaactgtgggctttaagactatgcaaatcttctactttggaagaactgactggcagggccaagtgcaatccatttatttttaatatgatgagacagagaaatcctgttaagcttaggagggcttggctgtagctgagcaggctgactctaaacaaggcaaacgcttccagacagtacagagggatttttactttctcagactggctgatttgaagaaactaaatagatgttactctgtaagaatgggtggagatgagcagcggggataggttttagcacccagggttaaatttttgccttttgctttattgctattttatgcttggatcacaatatgagaatcctcgatgttttctctagttttcttttcctctcccatacttccagcttagtttgttttccagttatgagcgacttatggaactggtacacctggcatttgtgttttcagattgttttatgtgattatgcacttctatcccaccctatcccctatcttgtctccctctagtctttacttacaactagtctgtaaacgcctggaaggtaaaaagcctatcagcgcagagtaggtcctcaatgaatagttgtcccttaattagcccttaagaggccagcacctgtattttagtcatgacccactgccaacaagcttgctgtctgagatagctggtagccttggtaagctaagcaatgaatcttccagttactttgtgagtactaggttatcccttttcctgactatttgtcaatgggcagacaggatctggatgaaggcctactaaaagaacttcagcgtggcttcttctcacatctgtcctaatggaacaccctgccagcaacagaaattataactgccgtgagtcactgtgagtcacatgggttgccacggaaacctactaactatatcaccaaagcaccttccattagctttgccaagaatggttcctgagttttcctggactgtgaaaacaatgtgggtgagccccaagtttggggttgctaagagtctacaataaaaaagtatggcctcaaggataggaaaaaaaatgagaaaataaggttattctagtttttggatctcctgagtaaatggcaacaattgtgacaacttgttgggttcattttgtgatatcaatgaatgcctatggagaggaggttgaggcctcaaaactaattttctctaagtcaaattcaaagccaagtctctggggtgaaaagtgaatacattaacctattccattttaaatgattgcaataaacactttttaaaatggatgcaaaagattagttctcaaagaaatattttgatttgtgctaaaatattttactattgagaactaaatctttttataaataacacagtgctttaattttatattgtaggtattagcctgctacaatcaaacatttgaaaatgtactagattaccttttaatggctattcacgttaactgaaaatatttccgaagattcagaggcgtatcttgtttgggtttttattggggaaaattaacaactcaagttgggagtaaactgacacattttcctgactgcttccactgagtaacctgcacctttcagaagcctgtatctgtccctcagtgtgggagaaagcaggcagggcaggctaggacaagaggtacaaggactgtaaacaaggatgagaacagaaggaagcagcaatggtctgatgcctctggaaacggttcaggggcctaccagatatcttttgggtctgtgttgtggtggctgtctgatatatgtcctctgaggttaggactccatgatgctaaactttccagtagctggaaagagctaggatgatttgttgcatcttttcacctccatatttatcctcttgtaacgttgtagcaaatgcagaactatccaagaagaattagactaagaattcaggagtgaatgactcgttgtccttggcaaataataaaaaccaacacagcagctgattccgaaaatgatacttatctgcatggtggctatttcagcaggaaagagaccagaacaaacttgtgaaacaccaaagcaaagcaatcttgaaggggtccaaccaaatacatgtgctatataatccccaggaaaattaaattgcaattccacaccacagtgtaaaattgatctaatattaaaaactctcttttatgtttgcacaccaaaaaccaacagcaacatttcctatcaacaattgaagaacatcacaaatataagaattccttgaacaatttgggcacgagaaacactagaaattccaaagcttgtcttctcccactggccaactaaacagaaaacaaacacttaaggtacccttctcagaagcttaggagaaactgagttctccaaagactatgtccatgggctcctctgaagcttaacagtcaaatttcccttcatgggaatttctgcctcaagtcacccaaaacatttattttttttaaaagaaacaatacctgtgctttccagataacaaggtggactaaaatactatctggtgtcacaactattcaggctcattttgcagtatgtgcacctctgtcttgtgtacctgtgagctgacactctggtctgataatatattctgcagctgtacatattaatttgtaagttgaacaatctctccgtgagggcagttaggaaaccaagattgaaattgctaatgtcgggtgacttcagctgtcgatgattatgtagtcaagtcttgactaaggtttccagaaccctggctaaaaatggaagttttgagacggtacaaaaatgaattcatacacttcactgatagtgaaactttttgaagaacagatgtcaagatgatttaagaggagctggaatttaacatcttaaaaaaaaacgtataggcaagttaggacagttcagttttcaagaaaaatccaacaaatgctaaagaagaagtaatttgggtgactgttattagagaaaaaactgactgattgtctttctcctcacaagctgtgggccctgtggagatgctaagatcagaaatacgatgggctgtctgctgagctgggtgacaaaaacaatctccatgttcaagtggcatggaggacttccactaacatgtaacttggacaattcaatttctccttggcatatgtaaagttttgtgtcaactgtgttttcaggtgctattctttccaattttgtcattcggccattttttattctgggccctctcccccaatcatgaaagtaaacatcaaccaaaacaatatcatttctgatccaaatctttctgtccattatataaaaggagctttaagtctttctacattgacttcaagcttaatgcctaagaattttcttgctgattttcacagttagaaaggcactcaaagtccaccctgtgtggctatatcttgattttgcattaaagccagtatagctgatgaaattctttaagcctttgtggaaagacccacctggttcaagtgtctgtttttagaacaccaatttttcctctctagccaccactctcatgctgtcatctaagtccctccatgaatttaaactcaaccacaggttattgtttctgcaatagcccaagaaaattattctcagggatgacagttcctcgaatgtctctctttatatggactgtctgtatactaggtaacatctagatttctgtctatgttatcttattagttgggatgtactcttcatgtccagtggagctgaagtagtggttttgttcacttatctaagagccaagtcataatgcaaacagtcagtagctttctgtacattgccaggtggccaggagtccataccccaaaccaccataaacagtaggcacaatcatcagcccctgttggggagaggcccaggactgagctagcagaaagactgaattacttaccacctctagagtgggtccctccgggccagggacgagctcatgggcaaggctgtgcaaggaagcgctctgtaccatgcctgccctgcggatatacagaggacttcagtctcctgcactgtcaatctctcagtcatcatgagctcaattatgcaccgacaacagcaagaacaagaacaacaacaacgacaaaacaacccccaaaaagctaagggtcacagactaccctgatggagggacagccaactggaactgtgcattgagagatggaggtgccatccggatcatgtgtctagtacgggcctgaccttttcattgttcctcaagcaaacattccattgaaggccatgagagagccacgtggagagactgcaggacagggccctcagagtcaggcaacttctcatccaatttgacgttttttggttttttcttttttttttttttcatttttgttttctacaaatacagatagacagacagacaaacccaagagcagatttcaagaatcaactgaggcacaagataaactactttgatgtaatacagatgttttcccccaaacgtttcacatgaaataaaaaaatttaaagtgtaattaggaaaaattgggggatacatccttgttgtccctgtattgtgccataaatatctccactgcttgccttagaagaatgcccaaacatatctcataggtagcacgtatccgtggtctaaaatagtcatcaaattctaatgacaccattaattcaaagcctaaataatatgctggtcaattacagtgaaagttgactgcctgcatcaatgatgtcttgtttcatcctgaggttcaaggcacagtcaaacatcattgctcagattgcaaatcacaacaccttacattgacgtgagtttgtaacttatggtgtagttcaaatgaaggcaattgatgaaagcagttgaacctgagaagtgggatgaatacagagcataaatccagcacacgtttccacatcaaactaccgatgccatttatcagggccctcgcaggccatgcccgtggtcgagcgacagcgcctctattcccagtcagcatctctgctccacagacatgagtacgaaacggcctaatttgtgaactagtggtgaggaaaaggagaccaaagcttaaaagaaatcaaggtgatgtttcctagaaacataccagctcttctaagaaggatctaggataagggtgatcagtaagtaattgatcctcctggctagatttcatgatttttctaaagcttcatggctggaaacactggaattcatcagaatatgtctctagcctctctcttcaacacacactcagtacaaacaggtggagatgtgccacttccgaccactacagattgaaaaaaaatgacctctgttgaccatggatcacagctgaaacattagtatatacttgaagggtcacagcagccagacatatgcgaattccaactcttcagaaaactttggacagaaaaaaaatgcattacttacatgtatgtgtcttcttcgttactgagatacctggaagagaagaaacaataacataggttagaaagtgccctgtgtgtgctgctttgaatgtccgtcattcccagtgtgctcaggaaggcgtttagttcagatggggaagtggaagcaagaccagttttaacattgcacaggagtgtcactagacctaccccaaaggcatgcaaccgtgactgatgaggcagcgaccatcacctcctggtttaagaggttctgtggtaaaagtggggagcatggacaataactaaacagggttaaacaggacgcgaggagactcttattttttattttaagtaggggagacaatcatgtttataggcagagtgggaaagatgtaaggcacaagagagcaatgccagcctactcagaccagggtaagatgagcaacacggcaattaatttgctatggccattggttctgtgtttactctttaatgaaaacgacccttcctcctcccatgaagcacaacttttaatggtgagggggaaatacatccaccaaatgtacctatgtgtctgtactcattaaggtcagaaagggaatcactgctacttctctaaaaatggcccccaaatgtttcatacagttgaaacacaactgaatgaaatgtatgaacacaaactacgaaaacacgagcgattcatgagtcagcacccttgatatttcaggatgatttataggtagcaggtgacaaatagaactaagcaacatttggcacagaagtcctgataaagatagcataaatgtatgctttgatgcaaacaacactatctccatttcagaattactacattttgaatcctttatgctgcattcttcttgggagacgttcttgagactaagtaggctcaaagtcataaaactgttgaaaacatttagcctgtgactaagaactgtggtaaaccttgaaatttttttttctttcaagttattaagggaactatttaaccctcctttggaaagtaaaagttgttgaaaaatttggcagccacatcagacctattacttagctagggaacatgtcgtacggggaagaaatctgttgtgaaaatccacggcagacattttttaaaaagttggttccgaagttgtgagccaagaccaaaatcacacacttgctccccccaacactttccaaaggacttatttagggaagttgaaattacatagcccaactcaaattcttctccccgaccccgcaacttttattgaggaaaactattgttttgtttgtttgtttgtttgtttgtttgttttaaatcatgtttgagttggcttcacaaagtgaagttagaaccttctaaaaaaatccttgaagactgtctcacatgaaaactacaaaagtgttctagaattttttgaaataacctttatcgtgggaagggaacttcccccagcagcagcagggagtaaagtttaaaatctgaatacaatttgcaactccagctcatgacaccagcaccaataaattgatacattagtgcactttcagcattatgagagatatatgtgtattttccttaggaaatagtgctttctgtaaaatcactttgaagagaaagtgcttaggctgtctctcctgattattcaaaacctccacacaattggatttaatacagcccaaaacgacctatctatattcgctgagtgtggaactattttctcttgacatccaaaggcctgatgaaaataccactgctttgacttttctacttaaatttattatacagcgtgatgcagtgttctcatcaaatattttcatgacgattacattgataatagattttgaaaatcttcccaagaaagctgcttgatctcggaggtcgcagtagctggcatggagctaaaacttttcattatctgtctccaggaggaagcatgactttggcaacaacacaatctctcggtccctcagttttgtttaactgtcaattaataatcaatataaataactgggagctacacttatattggagttgccagatttagtagataaaatacaggctacccagtgaaatttgaatttctgatactaatttgtagtttatcttacattcaaatttaactgtgcattctgtattttatatggcagccttaacctatacaagaagaatgtaaattatatttattatagccaatgaagatataccaatcaattaataaacacatttttatggagaaaagcttagaagacacactcctgacacaagagcaatatttgttaaaattgcattacaactgcttaattatggagatacgactgtgcatgatatttaattttttttaacctagccattctgaagacagaagtctatttccctagagaaagtgaacaaacaaaaacaatacaaacacacaaaaggcaaatttaatgaaaaaaatcagaaaatgtattggaattctctttgatcctctgaaacctaatttctccatagaagctctagtacttcatagtaaatgattccatagaagtaccaaaaaaagcagaaaacatccttttcatttcacagatggggaaactgaggctcaggaaagtttaattggcataataagacatttctctgtggaaagttatattaaactggaagtacactcatggcaaatctttaaaaacactagtgtagatgtaccctcaaaagagtaaatactcaaaaaagttttactccttggagcataccactcagcagtcagctctgtaaataatttaaacctatgggagtgccctcagccatatttaaaccaggaagactcatcctgagtttgggtgaaagatgtactcagatgctgatgcaaacacacagaaaccacagtccctactactagaagagcatattgaattgaatctagaatgttccggaatattctagaacatagtattctgccaggaatccagctgaccgaattacccacacttgcccaccttaggccttcattcgcagcaggcatgtgtgcctgggtttgttaccagcagccattttctcacccttaaatgagggatgggtctccccttttctttttctcattttcctagaggttacaagattcctgtttttctcaccaggaggagaggtcagcctcagtgagctcatagcagtcatacattgccagtgtttttcctcaagtggaaggagaaaggccttcagaaaaaaaatcgtatgcaaacctagtgctaccaccagcagtagctctgaatcgagatttttgggagaattaggcttactaaagataaactacaataagtctcaaggaagcaaataattctgattctaatgaggaatccaagaataaaggcagctcttaaggtaactagatctggagtcaagctgacctgagcttgcgtgtatagcccattttcctgcttctaggttgagagaccttgaacaagttacttaacttttctagtcctgaatttcttggtttttaaaattgtatacaatcatgatgacacttaaaagactgttgtgaaaattaaaggaaataaggatgtatgaagagctttacaaattgggaagtgtgacacaaatgactttggtaaggggtgagcaactcacatagtattagtttaaccaaactgaattaccatgtgatagtgaaagctatgccattgctactcatgatgtccctcagtttcatactgactcatggcctaggactctggttttcagaccaagtactctgactagaaaatatcctcatatttgatggaagacagcatgagacggagaaccaagttccttaaagtaagtgtactctattctagatcccaagctccattcgctttactctctaaagtctagagaaagagcctggtatggtggtgggtacccgtaatcccagctactcgggtgactgaggcaggaggatagcttgagcccaagagttcaagtccagcctgggcaacacagtgacacccagtcttaaatttaaaaaaataaacaaaaggaagctgcctactcactagcaagtggctgcattatccaagtgggctgctgatcagcacaggcaaggactttggtccccactaccgaagggcatcgaaccaagtccagctgttgtgcaggttttgattcacttccaaatgactgggaagaacaccaagatccttccccagagattcacaaacagaccacgagcagggtaatgctctctacagagatagggacttgatagaattgtggtgaatgacggggtggaaccaagtttctaaacctaaaatacacatacaccctgcgcccaaagtgaacacggtggatgacttgggcaaataatttagcttctctgggtcttagttttcttatatgcagaatgaggtagtcagtgacattttttttcttccagacaggttctcagtgtgttgcctgaactggagtgcagcggcaccatcatagctcgctgcagccttgacctcccaggctcaagccatcctctcacctcagcctccctagtagctggaactacaggcatgtggcaccatgcccagagaatttttactttttttgtagagatgggggtcttgccatgttgttcaggctgatcttgaatgcctggcctcaagcaatcctcctgcatcagcctctcaaagtgctggattaaaggcgtaagccaccttgcccagccaacatgatttcttaatttcccttccagttcatcaaccaatggctccttgccctgcttctaagctatcaagccaaaccacatctttccaagcaacaggctgtcagatctatttctcactgtaagaaatccaatgtggctcataatcaaaggtaaccccctgaaacttttttcttcttgcctttaacaaccaaagaagaaaaaagacagtgcccacaaaaggttatataagtaaaagatgcacttttcttgggagatctttaaaaattatctgggctagagaaaaatggcaccttttgataaagctgtaagactccttctattttacccagatacacatacacacacacacacacacacacacacacggcaggtgtatttccagatttccaggtaatgcttgagcacaatttctaacttaacaatatgacagaagttttaaattgccaattaaacccctaaaactaagagggctaaaaggccccaaaatattcggtccaaagcaaagttgagcttctaatacagcaaaaatgcttgactctctttaactggccatgcttcaaagtaaagcaaaggaaatgtcatgaaaatatcacagatttagccctgccatggttatcagtagggaagtttcattatagtcatcccagaacagagcacttcaggaatgtaagctggtatttcccgtcagtgccaaatcttggaccagttaactttcttgactgacttctaattgtctcttggtttttaggaaattgtctgggtatccagttaattttacttttttttcttttttttttagtaagaggtggcatttttcctcttcccaaattttgcaattaccaaaccagcatttccagaggccttgtatcctggacaaggccctagacttgatgccactctgccactttgccagtattcagcctgtgtgtcttcttttgtcctcttttgcaacgagaaaacaacttttgagatagagatattataaacatgaaaaaattctgtgttagcattaaaaaacgaacaggctggtcatggtggctcacgcctgtaatcccagaactttgggaggccgagatgggtggatcatgacgtcaggcatttgagaccagcctggccaacatagtgaaacccacagtctctactaaaaatacaaaaaattagccaagtgtggtggtgggtgcctgtaatcccagctactcgggagactgaggcaggagaatcacttgaacctgggaggtggaggttgcagtgagttgagatcacgccactgcactccagcctgggcgacagtgcgagactccatctcaaacaaacaaacaaaccactcaaaaccatgccatgtagatttccttttattttaaaaatatgtcaatatttttactttgcaagtgaatgtggcagggaggaagagatgtgttgagtgataatgaacaaagtcttgaattggcccaactcatgtctctacaccaggcttgcacattgactcctcctttaattcctagaaaagcagggctccaaatctgaaggctttcacaagatttattctccctccctgcaagatgtctgagttaaagaagacacctattatttaagctatgagcgcttgggcaaatatagcttaacttctctgagcctttcttttcttattccataaaatgggaataaaattcttaggactaggtttatagtaaaatgtaagataattcacgtggggcacaggatatagtacctctttcctactaaagtatgtttcttattgcatacaccttgtgaatccactttatattagacaaacagagagacaacccttgactggacataggcaaaacccattaatcctgttattaaacgggataatccgggaaggcagcattggagagctaaggaaagaattttccaaataaaacccaaacacttaacccactccctgccacattctcaacaagcatgctgcaaaggctgtggtctcctggatccgctgtgctctccttacttctttttgacttcctcattgtgaggcgctagcagttaaaacggcaaatttacacgcagtgcatgaacactagctaagaaacgaggcctagaatttaggcttcttttttgaatagctaataattgttttctaaagaaaaaatatcactttgtgctggccttatgtccccctcctcctcaatcctgagttgtcccaggagactgctccattctacacatagtcaaaaagaaaatctatgcacgaggcggatccggaacacagcccgagtagggcctcgccaaacaaaatgatgttacaaaacaatgtccttgtctaggacaaaagaactattaatgataatcagtacatattactgaaagtgctccaagtaatctttggactttgtttcaaaaattcttaatggacactaatgcttagagttcactcaaaagagaaataaattatgtgccagggttgcagggaccaaggacaacacgtggaaggcatcaaagcattagcaatgttacgacaatcaaacattttgtaattgcataaaaagcctttaaaaatcatttagatatactaattatgaacattaataatactataatgggaggtttcttttatgttcgatttgagcctaggttgagctgtttcggcaataatatttcagctcttttaccaaccaaggtgctttggacgccatgaaaaatattccattttagtttgaaaaatggttatgggaatggataagaggaatttttcctgttttttgaattcaaaaaaaaaatttgtgattgctctccatctctaggtcatatttcctgacattagtgcccagaaatatcttttaattttggacaggcagaccagaagtatgccctctttcaagtcctgcctttatctttaacaaaacagttccaaggacaaagcctcattccgggttccccagcaaaggcaacataaagagaccatcagtctatcagagaaagaaatcttcagacaaaacttatttgggaaacatccctcttctcagagattactattcaatgcactacgaaaagtccatatgtaaggagggcaatttctcttgttatttactcgtcccaaagtatgattagtacttatgtatagtaagaatcataagaagccttattttttcaaattgatttccttttattgagtgtctgtatggaagatgatgctatccattcgatattacctggttgatttaaatttgatcttggagctctgagggcagaggtgtgaactgatatcaacactttcagcttagccttctagaattgagcagttttatcttctaagtgaataattcagctcaggtaaacatcagcagcttacaccatgcttttccagaaatgctttactttatgtgcctctgcaatctgttaaatctgtttatctttgtcactcatatgggcaggtacggaagtgaactgtctgtgggtgacttgcctggatgccggctatagctgcagcccccaaagtcgaagctaccagaacaggttggatgaggatggcccaaagattatggagttgctggccccaaagcaagtcagacactatgggaagtttgcatgaatcatgcccttggatagacaacctaaatcatacctcatcgagcatggatcctggtcagcataccaagtcaaggcaagtaaagactgaagaaatatcacctggtctgcagctccccccagaacgaagtctgctactgatggcagaagcatagatagaccaagggtatcactatgtaatgatggaagaaggaaaaaccccatgcattcactcatgtcttgaatcacctagagaagagagggaatctgccaaagtggacacaatagaaattcagttctaaatttggaggaaatgaggcccactctcagataagatgaaaagtaaaagccctaggatccaatggggtattaaacaaatatttaaaagtagagaggtggtgaccagttatttcctgatatatagaataccatgggtccataaagaattttttagagtatcaatattattaacactttgaagaagacatatgaaaaactgattaaattataaattaggaaatcatagatcattactatttgtagcctctctactcccctctgattacagaactttaggcagtttgtctggattggtgattgctggataaaagctcaagaaaagaaagtagccatcaagatacttctcttgggaggccgaggcgggcagatcacttgaggtcaggagtttgagaccagcctggccaacatggtgaaaccccatctctgccaaaaaataccaaaaacattagctagccatggtggcgcatgcctgaagtcccagctgctcaggaggctgaggcacaagaatcacttgaacccaggaagtagaggttgcagtgagcagagattgtgccactgaactccagcctgtgtgacagaatgagactccgtctccaaaacaacaacaacaaaatacttaccttgcattcacagattttatgaagaaaagtttggtattgttagattagatgtacaagctatgttcccatatgggattttagaatcaggaaatctggattcttttcccagctctgccacttaccagctatataatttggggcaagatactctctccgatcctcagtttcctcatcactaaaaggagaggaaaaagatttcttctttcattctaaaattccaccactagaaattttaggaattaatcatgaatatacacaagagttatcataatattatttatatcagcaaaacattcaagggaacacccaaatattagcagtagaggatggcaaataaagcatgatatgtttaccaaatggaaggcgctaccatcattaaaataaagaaaaataaatcagagacaatgatgttccagctgcattatgagaaacaaaaaaattcaaagtcccaaagcatagtatatcattttgtcaaaaaaggaaaaaaaaatgtatagaaaaaagacaaaaaatacatacaccaaattaatgagagtgattatgtttgggtggaggaattatgactgatttttctttgtctatgttttctaaaatttctataaaacacctgtacaaataaaattataataataagaaagaaaagttaatattaaataactattccacaaggttactgtgaagataaaatgaaataaagcaaggcaatgttgacctaatattagtttttaatattgcaaacatctctctgtgactgttaggagacccagtttcctatggcaagtactaattgcattatcctttctagagaaccctatgtgaagtctgaagtgaaagtgtgatagcatagctggctactttcaggagtgccctatggtgatggataatctgataatacttgccaaaatggtaatcataaccaatatgctgataaaggtctgaaaaataaggcttgcttagtaccatgtattttacacagtgctcgagaatgcagtgagagacccaggggctgacttgggacaacttttgactcctaggaaaaccaccaccctttagctaccacacaggtgtttgcctaagccaatgactatagggcatatgactacagtgtcaacacataccagcaaccaaaggcctgtggagacctctgcagtacaggtgctacctcagagactgatcacaaaatcctcaaggcaggagtgagccctttcatcaggacctcctgataaatctccaggagttagtgccctgtaatacaaagaggatgacctctggagtcagaaagacccaggttgcaagcccagtttcacctaccaactagtcgtttcacttgaggcaagctacttagcttgagcctcagtttcaatatctgtaggatggaagtaaggatacctttttcatgaggctgttgtgattatcaaaaggtataggcagtgcaaagctgaaagtggtcagctgtcagtgaattctattatctaagcaatgttatctgatggcaatgcatcttacaggaatgcattggaatgttccatagagaaaggaaggaaaaaaggcccatatgtccttgggatgagacactaaggtggccccgagcttcagaataaactatgggttcttttggagattgacataccttgttatattttgattgatttcaactagcacagttcttctcttttaaattattctttttccatttgtctttttttaaattttagttttaaaaaggttgtaacgggttgagttgcatcccccagaaagacatattcaagtcctaactcctgatacctgcgaatgtgacctcatttggaaatcatatctttatagatataattaagatgaggcaatactggtccagggaccagtcatctgaatacttagactaagtatttagatttagtctaaatttaattactactatctgtgtaagaggaaggagagggagatgtgcattcagggacacagacaacacatagagaaaaaggccacatgcagatggaggagggattggagtgacatagctataagctcaagaatgccaaggatttctagcaactaccagaagctaggagagaggcttcaggaacttcttccctaaagccttcagagggagcaaggctctgctgccaccttgattttgggacttctagcatccagaactgtgagagaacaccaccatcctttagctaccacacaggtgtttgcctgtgccaacgacaattggcgtaaaacaatttctgttgttttaagccacccagtttgtggcactttgttaccacagttccatgaaattactacaaaggtccaggaaatgttatgagtgtaaggtgtctggcaataatactctggggtcctccaaaaacagagtgcagttgttttcttgctgccccaccaaatccattctcccattcctccagggcagtcaagttttagatggacacatagccatccagttagaggctgtaattcccagagtcccttgcagctgggtatggccaaaagactagattcttaccaagacatgtgaccaggaggggtgtgtgtaacttccatgtcacttaaaaggaagctgttcactctggatatcctttctctctctcttcccatggactggaacttgcataaggccatgacccagctccagccatgtgggcaaggccacctttggagacaggagagagcacccagacaggacctgtgagcagagcttccttggcagcctccactggcttcaataccacaggagagagaagccagcttctacctcatataagtcactgtgttcttgagtctctttgctacaatagttttcaacctttaccctaacaaaaacacagggttaggaaataactagtttatagattaaaatccccaaatgttagatctggaatagactaaagaaattgtacctttccctgaaaaaggacagcaaactgggactcagagggattaggcaactgttttcaagtcagccagccaattaggagcagagcaaaaagtagcaccctacacaggagtggctctgtgggctctgaggcctggacgcgttgaagtcttcctgttaccatacaggacacctcaactggacccaggaacaatttcactagccttacttagaagctccatgtaagccagagtgactttttgaactataaatccgatcacatcagtcccctgctcaaactccttccacagttaagagggtcctacatgatccggcctgcctggttctccgacctagtgtctccctctctctctgtctcacccatctcattcttccacactagccatcttaaattttctctaaagctctaagcttgctccagactcacatcctttctgtttgtagttccctctgcctgtatcactttccctccacttctccgcaggtctccttcacatccattcagatctttgctcagctctcatctcctgctagaatgcttcccagccggcttatccacattcgctctccctgcccccctctccattttgctttactttgtatcttcacaatagttccctcctcctgacattctatgatacagttgtatgtcttcccaacaatttcaattcttgaagcagggacttcccatccttggtataccactgtatttgtgatgcctagaatggtgcctggcatatagatactcacaaaaaattgttaactgaggatcagaaaaacttgttaagtgaatgaagttgactccccaaagccacacatctagtttaccaatagtgactccaaagctcctggaagtgtgtagagaagacaagaggagcatagagggtgagacaagtgctaactgagaaggtcggggacatctaaagagaggtttgcacagctgaagagaaactggaaggctacatacaaagagtgagaggggagagaacacacgctaaccccaggacccaaagcaaaggtcaggcaatcaatagaaaagttaaaatggcactgttaaacacttgtgataaaattgatttggtcattaccagagctgaacacagggcatgcatgcctcatctgttagaaagatctttatgatcttgttagcagatccccaacccagaagctgtaaaggttataacccaacttgtaaaactaatctcatattggctctgggataataaagaatctgcagaaaactttttagttaaccatatgctacatacagcaagaagccaggcttgtgtggctggcttctcctacatggcaattcaggataactctctcatttctgagattgagaaaactattttggaaacagtgatttcaatatgcatagttcttagatacaacagcttagaggttaacttgagtttaacaatttctctcctattcaaagtgattttataataaaaagtcagcatgccattcccattgaattaagctgggatcagttggaatagtagtttggcaaaactgtttttgccagatttttaaaaaaatacactttatttttaaagatagctctgttttatatttgcataatcccaattgtaaatatttagtttattattattattacttaatctgtgaattttgggtcattcttcctaaataaaacaatgcagcatcatttcttgactaatactcttttggaccacatggcaggtctgtggggtagtacagaaaggaaaaatgagttcacgctacatagcaggtccagaaaacagaacacaatagcaatcacaaaacatttctaagcagccttgtaaaggaaacaagggagaatgtgagagcactgggcatttacttttgagcaggatgcatgctaaaatatgtaaagatgaaatgatatgatgtctgggatttgctttaaaatgctttagcaaagggaaacagggatagataaagcaagtgtgacaaaatgttggtaaggctgaatctgggtgttgggtatagggcagttcattccactgttgcccctctttgcattcatgtttgaaattttcataataaaaaattcaagccagtaagggctggctggaaaactttaaaaagaggttcaatctctctaaaactgtgtgactgatcccaaccaaaagaaagcccaggaccagatggatttacagctgaattctaccagagctacaaagaggagctggtactatttcttctgaaactattttaaacaattgaaaaagagggactcctccctaacacattctatgaggccagcatcatcctgataccgaaacctggcaaaaatacaacaaaaaaagaaaacttcaggccaatatccctgatgaacattgatgcaaaaatcctcaataaaataccagcaaactgaatccagcagcacatcaaaaaacaaatccaccatgatcaaattggcttcatccccgggatgcaaggctggttcaacatgtgcaaatcaataaatgtaattcatcacataaacagaactaaagacaaaaccacatgattatctcagcagatgcagaaaaggccttcaataaaagtcaacatcccttcaggttaaaaactctcaattaactaggtgttcatgggacatacctcaaaataataagagccatttatgacaaacccacagacaatatcatgctgaatgggcaaaagctggaagcattccccttgaaaactggcacaagacaaggatgccctctctcaccactcctattcaacatagtattggaaattctggccaaggcagtcaggcaagagaaagaaagaaatattctttcaaataggaagagaggaagtcaaactgtttgcagatgacatgatcctatatctagaaaaccccactgtgttagcccaaaagcttcttaagctgataagcaacctcagcagtctcaggatacaaaatcaatatgcaaaaatcacaaacattcctattcaccaacagtagacaagcagagagccaaatcatgaatgaactcccatgcagaagtgctacaaagagaataaaatacctaggaatacatctaagaaggggagtgaagggcctcttcaaggagaactacaaaccactgcccaaggaaataagagaggacacaaacaaatggagaaacattccatcctcatggataggaagaatcaatatcatgaaaatggccatactacccaaagtaatttatagattgaatgctattcccattaaactatcattgatttttttttcacagaattagaaaaaactactttaaaattcatatggaacctaataggagcccgtatagccaagaccatcctaagcaaaaaagaacaaagcaggaggcatcacgctgcttgacttcaaattatactacaaggctacagtaaccaaaacagttggcagcatgttttcaatctactttctgatttcctcatctccctctgtgaagtaagtagtgaagatactgttggatccattttgcagtgaggaaattgagtgtcagaaaggtggaggggcatgtttaaggtcaaatggtccctgtaaggcagagctgggccagagctcagtcaaaggtttttgtttcagtggccattaaacttatttcctcctcctcctgacactggcccagtgatttaaatgctcctcccatgcccacatcaaaagtcaaaggtacccggcaaaaagcacggaagatgagcatctgaattctggctcaagagctccctgtggtctccatgccttgcagcgttaactctttcaccaataggctctcctagctttacattctggttgtcccttctcatttcgtacagtttggatttgacaaatgagagtttcgatggtgtattgttgtgcacataactgcccctccgttctacccaccttgtatttgtgagcaagagatataaccaggactggaggggcctcgcccaaacctcgaggacactcctcactgccagggtgacagactggacccttatgttattgtattatccaaatgcatgtggatcaatcctgccacacacagccaagtgttcccttgtctttgcttttccccacataatgtaaaaccagcactctcaaggcctttacaaattggtaaatcaacccatatgcagcgaggtcactttagttacctctaatttcagagctgtcactaattggtcccagaatctctttaaattcaggtctacagggccagaaagaagcttgaaattatttgaatacctcattaatggacaacgtatgaacaatttgatctttcagcgcaaagtgggatttatttgtctatgaaatctcaggcttgccatctacccccggttgactgcataattgttcttgctctgccccacgttagtcaggcactatgttaggtgacagggaaacaacggcagacaagatagtaatgatccctgtgcccatggtgcttaggaggaaaggcctatgtatgtattctagtaccagccaaagcctctgcttagtgacccaaattccactctgcccatacatgttgcatcagccccacccacgttcctagaagccatctcttctcccaacactgctcttcatatccacaactttaaggagcaaaaagtattttagggacactgaaaaaattcaggctacactaacttagcccaacccttagcatgttctcttttcgtctttgtcacttgagaccctgttgacttttttttgagggtgccaatatccatccgagtatgtacatgccagggacctcttcttggcttatacatttccttctacaaacatcttgatttttttttttcacttgcatttcaccagatcctgttacaggatctaaatattccaaataattcttacaattgctatatgatgaagagaacggatcctgttactctttatttacgtacataaaacccgtgcctcagtttccaaggtaacagaacaaagaaaacaagtcatcaccctgatgccaatacggacgaaggtcagacagctttgatctcagacaccaggcacttttcagccagcgcaacattctcatttttcatgattcctgcctcgcgcccccacgtccccacagctatgcttcctgtggcttactgaagggtgctttaaatatggctcgagaaagtacacggaggaagcaagtaaactttcaggattttagttccagcaaatgaaggcaaaagtgactaatcagagtgaagaggactcagtcaggagcatcagtcgcagaatgaatcagcctcagccggcaagtaatggcacaaagcactgttcccgcgaccaccaagccacagataaaccaccggcgcttcaaagaactcctacatcacttataagctgacagaagtcttattattattatatattatgctgaaactctgagccttactgtaagtcatcattttatatagttttcacaatgacagtaaaatcctgccacaagtggcactgtcaacttttctatgagcactttcttttcctcacggtgacattcaaagttcagagtctccttcatctaaaggagctgtcctatcagctcgctaatgggaacaattcatttaacctgcactccaagtacagccacggagccgagtaaaatatgtataggatccagggggaatcggtcctcccagctggcccctcctgccatttgattcattgacgagagtcccactttctttccacttaggctgatttacagaaaaaaaaaagacattccagaaaaattaagttaactattagccaaatcccctctagctgctggcttggattatataacaactccctaattccagaagctaaggaacagaaggccagcattttctctgatttcctatagttttaaagcctttccactctaccctccttttctcccagcccaccgcaccaccacatcaccacatacgcctttgacagtctacatggctcatattcctcatttactttaattatattgggtgcttctgcttacacactgcaatgtatcctggcttcataaaatactcactttatatgacccttgcttgctgcctttgacccactcaccgtgaaacacttgcggagccaaaattctaggaaaagcacctgcagttattaatgcattaaaccagtgttctgaaatgactaaatgcattatttctgctgtagaagaaaacgctgaggtgaggccagagcaaaggtaaaagacctggttttcctaaaatggatatagccttagaggcatttatattctcggaggacacagtcctgattcttctgatcatttttcaaatcgacttaatgagtgtgagatggcctgctcattaaactgatataataggtaaatatcacctgcatttagggtgggcaacagaaagagggcaactgttttctgggattgtaaaggatttgcaaatggagcaaaaatgcgggcctggtttctgaacgaggtttatgttctgctctcacttttgactggctgccacaatacacagggcgagagatttttaagctttcatgaactaaaagcaacgccaattgctatggattgctttttatagaatttcaagtaatttcacattacaaatgttacctctgcttatgacttccttaaaagataaccaaatgccaagcccattggaataaacatctagagcaaagagctacatgtaccccaacaaactgttttttcaaaagccacaagcctaggttagatgctttgtctaccacactgccgctcaagtgaagcctcccttcttccatcttccaagtacagccaaaaccctaaacacaacctttttaaggatcctttacaaagtggatgttaaaagtgaacaaaacctcattgaaccatctattcttcttgctttaacctgcagagtcatctacatttgctatttccttcaagtctacttttttttttttttccaaacactggaaacttcagagccactcacacattgcagtaattctgcctgcttgctctacataaaataaggcctgctcttgggttcacacaatcaggccggttactcagtagaatccgtggtctagggtaactctgaagagacgtaaatttctaatttttatactttcctcaaatttcatatgttatttttgttatttcaaaatccagtgctttataataaatttatagggtgcctaagggggtctccattcatattacatggtatctcattcacggctcctctgggagagaaacacagagttatacctctcagtcagccaacaacacttccgcttgtgaagttcctatataataatgagaaacgaggctcctgtgggtatcccacacatgtgtgtaaaataaacgcctacaaagtgaaaatgatgccatgctacacttaaagcaggatcatgtgggtaagctggaaaaaacacttccgtgtctgtagtcgtgaagtgattctgtattttattgtagacattgtatcaagtctcagtttcaagtgatttttatatatactccatgcttcagctgagatgtcttctgttcctccttctttccaggagcgtcagtagctatagtcaagtttcaagaatggggaatgctgtgggagtgtgcaggcaatggcctaaaaacaataaaaaagccccactaaaagctggcttgcttttgattattactctgtcctgacaattcttagtaatgtcagtgataaaataaattactgggccgaccactccctagcctgcccctcgttgacatggcactgtgaaagcactccaatatctttcttaagaaggatacattatgatttaaatactgaaaatactatatattcactgtaggacatgtagaaaaaaattttaaatgttttaatggagaattaaaatttacattaactctaccacttattgataatcatagccctttatgtcataattacttttttggttattaaaagtaattctactataaatatccttgttacatagatttcttttggcatttgtgtttttttttttttttttggaagtacattcttgaaagtttaacttttaaaaagcattgaatagatatcatcgtgtcctgtaaaaagtgtttaccaatttataattcctagattagtgtacacctgtcccaatgcagaactttatcatgaaaaataaatcctgataatttaactggctaaaaaggtgtccctttaaaattgacatttctttgttcatttatgatgttgttttgtctgcatttttaaaaaattttgtttttgttgtctaagtttcttgacttttgtatttcctcttttgttaatcgcctgttcataatctttgctcacttttgtattgtggtattagtcctttactacttactaatttataagacttctgtatagttaatcatatgttgcttgtctccccagtttttcttttaaattttgtttagtttgtttcttgtatatgtaaactagctctaccacttattgataatcatagccctttatgtaatttctacctttttggttattaaaaataattctactataaatatcctctttaaaatatccaatctagtaatcttttatttatggtttctgcctttccttgcatgcctataaggactttatttattgcaaaaatatattcacctatacttaaaatatttttatgattttactttttatgtttaatttaaaaattcaaataaaattatctaaatatacttttttcttgctctagtttagcttgcacagaaattgtttcactccacttctcaagatttgaatctaaacaacacaccaactatcttatgtctttctttgttctcccgagaggtatgtcactgtgtctgttgtgtcagaaaaaaaatcaggatatcaaaaaggcttagagccaaattctagcccaaaacatttacatgtagaatctgagttagctcacctcttctttagaaaataaggccaaccattgagatttggggcatctacttcttaaatttgtttttactgagtaaacctgggcaagtttcctgacttctttgtaaaatggggattctaataagagaagcacagtactgtagcatctatatttaacactttctgtaacagattactggtataacaggaagtttcacttttatctttattgtatttagtttttgcctgccacaataactacttatgatattttaatatttaccaagagttttccaaatagggctgattctattaaaaaaaaaaagaccccttgtgctatttatacaagcttgtttagattaggattatattcctgaagctaagagggcttcatttgctgatttcagacaaagtacgcataaagaacatgaaatgacactgctgagactgttccactagttttctgttttttgtccggaaggaaagccagggaggtcagagagacagaaatttctttgcagagaagtccaccctgcccagatatgggaattgtgctcattaggagaagtagtgggggagaggacgcacatattttctgaaaaaactggagcatgggaagaataatgtgcacactggccatcaaatgagatttgaataacaatttaccactctattcaaaagtgtctaaaatataacaacccctctttattactcccttttgccaggacatttgccatcccagaggtactaagggacaaaattttcagcagcaatgcattccttaaagagaaggacagcagggtagttgaccttcgatcctgtctgaccataccccaaatccttgacatccttagctttgcagaaactggaggaagcagagccaatgtgatgatgcttaagggaaatctttcatgccactgataggaaacaggaatccaaaggacatttttaactcattcctcaaagatatggggatgagtataatttacattcatcctctacttcatgacggggaaagaacagcccagtagtcaaagcaagaaagaagtcaggaatcttttcactggtgtatttcatcagcaataaacgtttccccaacaaaatgctgtattcaaggcatcaaggaagttacttaatgaagaaaggcacctggcttctcagcctttatagctctccaaatgttccatgtttttaaagacctccaagcttttttctgttccttcttctagggatgctctttcctttttcttgactgagctaattcccatttatccttcaagatccaaagcagggcttcactttgccatcacacccagagtatattggttgtctctccctagcacatccttaatccagcctgctgtggtctgttgtgcaggttggtcacagtccaaggtcatgggtgaagggatgggtggggacatgtttcattcgccgactgccaagccatgtgccctggtttgggtttgcctccaccccgaggaaggaggcaccttttaaaaatcacccaaaggcggcctactcttctctgcacttaccattctcttgtttacttgtctgtctgttcactactcccaccacgtacattcatccctcactatcttccctctcaaagaatatagaacatcactccttccaattaagtacacggacaatatcttttatctcttgatcctaagcccctgccattgtgtctggcacataatagcttcttggaaaatatctcttgaatatttgctgaatgaatcaaatgtgccttcaggaaaggtacagctttatgcaaacaccttagcttcctagaagtagtgtaaaaaaagcttcacatgggcaagaaccaccatggatcaaaggggactgaagaagttaggagaagtttatggaggaagtgagtcagtatctcacaggatctcacagagaaacttctaactggggattcagtttctctcaatttagtgtccggtgaacaaaggatttggaactcaccgacgtactgcctctgctctcccctgtaactgtgagaatgcattcactagctcaatcactcaccgcaatatttatccatcacctaccacatgcagaactctgacaatgcccaggccctccacccgcagcacaggctccggggagtgccctgtccccgactcggtctgctgtgatttttcctgcccttgtccttgcgggcccatgctgtttctataggagagagaggaacggtgctcctctccttccgtattgcaaacatgctcaccagtgacctcagaagtctggagggaagagtgatgaggcagtgttttaaaagggctgtgaggttatcagagcctgttacatcagtctttgactcttcaaaggcctggaatactgtaagacaacagcaacttctcataaaggtcacatttctgtaattccctcttagaccctcccgaggaacgcttaattgatcaactaacatgcaggaaatgctctaaaaggcagttttcacaaactggtggaggataaagacaagatctttctgagagaggtagtttaggattatagctgagagcacaggcagatgatggagtttgaggctgggatcagtgcttaccagcggtggaacattgggcaagtcacttaccctctcaaagcctcggctttctcttctgtgaaactgaaataatgatggtactcttctcatagggttgtaattcggcttcaatgatcttttctttttttgagacagagtctcgctctgtcacccaggctggagtgcagtggtgcgatctaggctctctgcaacctcaacctctgcctcctgggttgatgcgattctcctgcctcagcctcccgagtagctgggattacaggcacgagccaccatgcctggctaatttttgtattttcagtagagatggggttttgccgtgttggccaggctggactggaactcctgacctcaagtgatccgcccgcctcggcctcccaaagtgctgggattacaggcgtgagccaccgcgcctggccagtttcaaggatcttatgtctgcaaaccatcaagcaatgaccagtgtggaatgaactccttcaagggtatgtgaataaccttaggaagtcacatcacttataagccagtattaatattaatgttacctagcttggaaaattttacaaggattaactgaaacaatgcatgtgcaagtggttgtcacatggtaggtcctaaaaacggtagttccttaagattactggcatgagatttttctatgatgctatgtttaaaacttcattcttgaaggctgactttaactcggtttgtttgggaggaagccctctccttccatggtcaccttgtgtggaatgggccttttccctcttgccattttcattcaaaatatctgtggcagtgctgcggaatattccaatacgtccccttgacctctatccataaacagcctttctcacaatgagatgttccgagtttaggagccttgctattttcaacaaagaattaattgcaaagtaattaagtttagagcaagggaatagatgaaccctgtctatcataaaggaacagtgtggatggtgacataatggagcaaggagacgatgcttcagattaacacacacacacacacacacacacacacacacacacaatctcttttctaaagcacacaaagaaacctcccatcacatatattgacaagataaatctaagctgcttaaagaagcacttaattttgttctcattaagtcgcagggttaagggctttaccctcaacgcccatggaagcaatgttaggttttcaccttggaaagttctctgaggccctaagtccattgacaaatatagcactaagatgtgttacagaaaattgcatctgaaagccagttgctttgctggcctcattcccacttggctctgtgttcttcaatgaacatagaacgcacagagaacaccagaggggcacacgtgttcatccctctgccttaatgcacacaaattatgatcatcccactgtctgatcagcagtggatctaaggtgggagggtgtgcagcttagatggggacagtcacaagccggttttactactagagctaggaggcttaatcttcttaatagcgattaagttgatgccaccctaacattttctctggttatttcagggactgagaaggtgccagctcacatcacacatcctttctgatgatatgaatggagaagtctatgtcataatttaaggtgcattcttacacatcctgtgttctgattagagcaatatattgccagatacctcatctttgcacctgaaaacacagtacctgggatttaagaaatatttgagcacttgaaaggaagaaagaaaaaaaaaaaggaaagaagggaaggaagaaggtctagaaggacacataccaaaaatttaactgtgattgtatctagtaattttcttcctttctacttttatgtcttttccataattgttatagtgagtattgttttacttttatgacgggtacaataaaatgaacttgattttgatcatttactaaaactgctttcaaaaaacatcaattctaatacaacgtgctttaaaagtcttcattaccctcaaggaattttacctctgactctaggcaacacagccgtgacaaaaatgcgccactccaagcttcaatagacgaagtctaaagttaaggtttctcccgaggtgtttacatctcggctcttctctggtgctttttcatggtttggtttggaggtgagttgtaggaggggccacaccggcatgcggttgcaaggagagaagggtgttgctgccctcccggcatcacacccatcctaagagcaaacacaacccacaaacttgggtgtcatactgcctgggtggctccccaaaggtgctggaggcacactcctagagggtggggccgaggaagctgagatgcaaaaaaaataaaaacaatggccagggctctgttgggcaaggttttctgttgtcttctttcttcttgcccctactgttcacagtatttggctaggttttgcttaaatctttcagagaggagtgttaacctcccaaaatgaaataaaatataaaaggaaataaaataaaagcttgaaaaagatgaccaggaatgccatagaaagaacgtagagatagaactaaagtttagggtacttcaaatgcgtaatctaggtcggacgggcactgattcacagaatactatattagagaccctcacagcaagccttgttggttattgattcagttccagaccatggttacctttcggtattgtacaatattggcttgaagtgctccacgtttgcacccctgactcatattgctctggatggtaaatgagcttgcacacgacatcacattgctccccactctgacctacattatgttttgctgtgaatgagtttaatggattaacatctgattggcatgagcttccacgtgtgactgccgagggttggcaatgcttttcgtgagcccacagaggcattgcagacgtttgctctgagttttcgtctcgaaaattttgctttgtgttttgttttgctttcctcctagtaagagtatcgttctcattatgacatttttgtgccagaaaaaaaaaaagaaagaaaaagtgagcagttccctacctacacaatgaaaaacctaggtggtttttattgttatccaaaacacagggcatgctgaactggtttcatttgaaggcagggcttgtattaaatgccaaataaggaatttttacacaatgtggaaaatgaggcaaatacaaaatgaatattgggttgagttttccctgaaatttctgtggactggagtttggatttaaaattttccactcataacttacattatcaatttgtagactatcaccacaagtatgtgcataatgatgaccctgtgatttctgaacagttacttaactacaatgggatttaatcaaaggattcaacaattgtaggggcaaaaggccgtaaaatgaacaaacttagaactgtagagctgtctttactatgcaattatgataaaggtcgagacaaggccattttctaaaagcagagaggtgattgtagtgtctattttctttggtaactaagaccttaaaaacaagcttctgaagttatggttagaattagaaatccatcccattcccttcaccaaccaaccaactgacatttttttattattaaaattttttaaaatatatattctgttctatagactgtaagaattaggaaaactgggagataatttctctaaagggaagtataatctatttgcttaatgatcctacaaggagctaataagtatcatctctcttagaaataataatactttgcttttatatagaatctttctccaaggagtgcaaagtatattacagataatatctaattaatcctcttagggtccccaggtgaaagggaagtggcaggtattatgaaggttcattggcaccatcagcatgtctcaggtgaggaaatggagctatagaaagcacggtaaaaagggcacacgcatagttatttaggctagatctgcgtgacctcaaagcaccgaatccacccattgacaagaagaatcaattgagtttgagcaaaaaaacaggatcgtttgactgaatgctttgccttttccaccagctgggctcatgtagcatgagttttagtaggtttgccagtgaaagaacccacattacctgacttccagcctggtggcttcttcagaaggacagcatgggtagtacggattgcttcagtttcccatttgctgcttgacacagcaccctcaagcagcacatcagccatgtggctgtggtttggtttctcattgtccttttacgtttggttgcctggagtctgtccattgttctctgcaaagtgggtctgtatggggtattttgggggtggggcatgaaggaaggtagtatggtaagaaaggggcaggggattgaataatctgttttggtagcttctatctgttgaagcaataggagatacactacaagtctacatcttttgtatcaagataaatcacaacctgagtcttgagagagggaagtatttgtcctgctgcaagtgctgctccatttcacttttaaacattccatgggccaaattcagcttcccattgtcacaaatcctctctggagacagaagcccataccactgtcttgatcaatacctgatgaacaggaagagagtgcttctgcaaagagggagcaaaccttaaaataaaagccgaagtagcacttcctaagcttgaaactcttccactgacaagctctctgcagagttggggctcagctaaaattacctcccaaaaaggaaaaagcctccaagagaaaattcagtcaaattaacaaactagttgcctctgatgtgaactacatttttgacaggttgagataataaatagtttctgattcttacttacctagctcaggagaagttgatagtggttttacaagagaaagacactaataatgtcacttgttgtgcaaatggaggcatacaacatgctctgagggaagataccactttttccaatgttggaactcaacaagtccatccgatggccctcaattggccactggaatctgtaaccgttggtttgccactagacaggtgagcatctactgaagcttctcagaatggaaaagcttccattctggctgttgcgaagagaagaaatctcacccagtcccctgaattcactctagcctgctctctgactctagcttgcccctcatacaagtacgaatatttccctttaagcatccatggtcatctatttctttattttatttatttatttatttatttatttatttatttatttatttatttgagatggagtcttgctctgtcacccaggctggagtgcaatggcgtgatctcggctcactgcaagctccgcctcccgggttcacgccattctcctgcctcagcctcccgagtagctgggtctacaggtgcccgccaccacgcctggctaattttttgtatttttagtagagatggggtttcaccgtgttagccaggatggtctcgatctcctgacctcgtgatctgtccgcctcggcctcccaaagtgctgggattacaggcgtgagccaccgcacctggcccacggtcatctatttcttgaagccactcaactggtccttaagtccacccactgacataaatcctcttttaataacctcgttgacctcttcctctcccacagctcttctctgtttccatgaagttcccatttgtgtccagttcttggctggtacactggccatcctccagcctggaatatcaccctactctctaagtttagcctctccccttatttaatactggggcacatactaagttcttccagatctgcttctcatcctgttcctctcagccaccctgtaggatttgtatagaacacattgtatacatacttgagttcatgtttaccacccatttgcaggccttttttgtggatgtatgctcagcctctccttccaaactaactgtcacctccttggactgaggcttagagtttagggttttcaggatagagagcttatctgttaggtcctttgaaccgctccctagcattctggcaatagaggagccctctgtattattcgtgttgatagcccaactaggactctcctaggtacctatcttcttttttaaaacaaaatgtagcctgaccaacatggtgaaaccctgtctctactaaaaatacaaaaattagctgggcttggtggtgtgtgcctgtagtcccacctacttgggaggctgagacaggagaatcgcttgaatccaggaggcggaggttgcaatgagccgagatggcaccaccgcactccagcctgggcaacagagactccgtctcaaaaaaaaaaaaaaaggaaaaaaaaatgttaccaacatcacatccaagtggcattcaactctggcttgcattagaagttgagttctttgtcattttatgcctgtatgtgtgtcccagggtgggtgggagaaacacttacaaatagcttctattgaataaagggctatgaaggaattttccataacacttgcacaaaaattattgcatttaactccccaggctcttcatagaaatcctaacatcttcccctccctcccaagccttttcagttccctacactttccccccaaccctgttcccagggtatagcggcaatagagcagctaagtctgtttggtattcagttagaattatttatatatcagagctcaggcttgtttatgcagtagaatgctgaaaaggaagtgaatcagatctattccctaacagagcatccaggggtcagggtgaaaacaaatactgatgataaggtaaaatccatgttctacagtcagctttattatgaacctcaaataccacagccacgcaggaccaaggccttgatgtagtgcctgcatagctagcaaagaatacgtgagcagctagtcattcctatcctagggaagctcctgagcccatgagcatggggaaaatcccagaggccttcaggaaaccattgattttccatcccttcctccaggcctacacatcccaaaacttatatcagaaagatccgtggtgggattctacaatataacacaccctagcttgattaactttatgtaaacatatctttgaagtgactacatttaagtttttcagcagcagtaattaacagctactaccattcactgagtttctactatgtgcctggtattattatacagctctcatttaattctacaacaactctgagaaaccattagcattactctcattttattgattaagaaactcaaagatgcaaaatctgatatctatgaagtaacagactgaggattaacactcgagctcctttgattctaaagcccattgttttcctttagatcaggggtccttaacccctggtactggtcctgttaggaactggaccgcacagcaggaggtgagccgagggtgaaccagcatttccacctgagctccagattctgtcagatgagcagcagcatgagattctcaaagaagcatgaaccctgttgtgaagtgcacacgtgagggatctaggttgtgcgctcgtcatgacaatctaatgcttgatgatctgtcactgtctcccatcacccccatatgggaccatctagttgcaggaaaacaagcttagggctcccactgagtctacaatgtggtgaattgtataattatttcattatatattacaatgtaataataatagcaataaagtacacaataaatataatgtgcttgaattgtcctgaaaccatcccccaacactcctgccccactctgtggaaaaattgtcttccatgaaactggtctctggtgccaaaaaggttggggactgttgctttagaccaccctgcctctgtatgccacatgtgaggcagtggctgcatttagaaggtgggggctgaaagttctgctgaggagggaagtagtaacttgaatatcatgtgtctggtctgtcaggagtttttaccttggtttcactgcctcagaaacactcagggctggaggcccgataggagagagactggattcttatccagtttatgccactctggacaaagccctatcttgccttgcacttagacttgggaagacaggtttctccttatgttaaaaattagttggccaggtgcagtggctcacgcttgtaattccagcactttgggaggccgaggtgggtggatcacctgaggtcaggagttcgagaccagcctgaccaacatggagaaaccccatctctactaaaaatacaaaatcagttgggcctggtggtgcatgactgtaatctcagctacttgggcagctgaggcaggagaatcgcttgaacccgagaggcggaggttgcagtgagccgagatggcgccattgcactccagcctgggcaacaagagcgaaactccatctcaaaaaaataaaaaacagaattagttatattaaaaaatagaacagacaatgctgccactgtaagtcttcaatcagagtgcagataagtaacccgtctaagatgtggtgcaggatatgttcaagtctcaacccaggcaagagctctgtgatgagaagttgactattaatggctgggtggccttcacctggcatgcatttactcacattctcatggctgcaacccaatttccttcctgagcagtgggatgatgttggtgggctttctggacagctcctgtggtgcctctgaaaagcagggctctgcttactacactggtcccagggcacagaagagggagggagggccccgcatgaagaatcccaggcaaacctccaatcctctatgctccagagcacacaaacaatcaggacctgtaggtctttcagcagaaggggcctcagagatgatccctccaactccagcacttagaggtgggcagacaaggcaatgagaaaggaagctccatgcttaacactgctgggaagtggtgtgctgagactagaattctgggctttttaaactccacatcatcagagcttctccagccttgctctgcccctgcagcccaatttgggcacatttatcccaaaagaggttttgcctctgtacggcctcataaggacgggtcactcctgtccctgctttgagtaactcccaacacagtctccgtgccctcaaggctatgtgtatttctcactttccctggaactagtcactcatggacactctgcactcctacttctaaactgcatacttctgcaggcccaggcctacatatctttctttcttagctgccaacttctttttgtccaagtagctgccagcatagaacaggtaatcaatacatatttattaaataaatgaatgtataatgaataaatatcaaaaagttgcctacagtactcaagaagatggacagtttcaggcagcagttgattagaagacaacttcagtaaggggtaataaaaggtggctcttcttccccatttttgcatccttccttcctcgcactcacactgtgaaccagaagggtttacctttagagtgctattctatggttgaagaggaggctaggctgagggtctccttcctctgtcttgtcagaagcacccctaatggtggctaataaattcgattgcatctatccttcagttttctaaccttctgtctcttttggtcctaccttcagctcaagggcttaagaaagaagatatttcttttggggaagatgatttaacctttgattggacctccaggtttctcaaaccctgtcagcaacccacctttgcatccaagacttactaggaaaatccaacatttaaaataccgctactgaaacaaattatatgataataaaacagcaaattccttagccttcccacagtcaccctcaagatgttataaattataatagaagtggtttcaattctttttttctgcaacagtataataaaactattttgtgatacgtagtctaataatacacagatttttttaaacaaatgaaatctgaattgtcagtgacagtgtatttttcttctatgaatattagaaatcttagcaagtgtggctgatactttcaaatgggactcatatcctacataggacatgttgataatatcattgcattaatttggggatgatgaagacttattccagaggtggtataccagttgttccctacatattctatttggattacaagtgattgtctaacatttttaaaaaagttgaagtatattccaacatttaaacatctagatgttttctttaaaaaggtgtgttttgttgaatatagaaaataggcaatacaaggtctttgttcctgcattatacaactaaatttggtctaaatgagtgactgccatctttagccaggacacaaactctctggtcaacataacccacagcactctctattgtctagtggaactaaggtcatgtgtcagttgccatttatcactgggtttgcatgatggtttggatttattttggcttatccttttgatatgtacccagacagcttaaggtatccacctaacttctgcagtcatctgcgataggacccagtgtattgcaaggcattacatgacggactggacccaattcaagctctggtacttgttcccgaggccagaagacaagcctttcttgcaaactgcacaagactcaacacagtcctactgcttccaggaaggcttttgtgactgctggtgctcagcttttctttatttccctgacgcggggttccccagcagccagaaccaatgacaccacttggtgagaattcacattgttgttcagttgcttgacttagaacagatttgtctttctatgggagaaaaaccctgaagatgaaaatactatctcttggacaagagagcctgacctctctctgctcacagctattggacacatatcctattcaacagagcgaatactttgaacctgggttaagcagggaaaaaaaaacaacaatttaggttaccttaatcagcaaggcaaacagacttttcatttcctttactttttttcagactgtggccagggcttccctggcaataaaagatcataccaaattgttctaaattatgtagatgatagttattaatataatcttcttccaaaagaaaacaaatgtcataaagccagcaatccatgccagagaagcccaggaatgttcccccttagtagggtgtccggctaacctgggcgctggcaagtcattcctcccttcacagtctgaggctgaagaggtcacttggtttgaggaaatggctcctcagctcctcctacccccactttacccactaagaaaaccaatggcgccttttatcagtttggcaaaaagacaaagggaatgtttaattctgtacttaaaattcttggttcctactgtcagcattcccagttctcagagaacactgaatggatatttgaagagttttgtgaaactgagactgaacagtggcaacgaggaggaaaagatccaaaattaaaagaacatttaaaaatacacgcccccgtacattccactctcctcacttttctctcctcctcaaccaagtcatattcagcccttaggaatattcccacaggagggaggtgatgtaatatcctcagactgtctgtgttccagtcccaattcaccctacctagccatgaggacttgggtaaggaagtgaacgtctccatgccacagtccccatgacagtaaagtgaagttaacaacagtgccaagttctggaacctgtcatctatgaagggctcaatacatataaactactatcatcattttaattttctaaggaaagcacctgattacaacaggatctgcaacgcagagtaacagctgccaactggcagactgctgaccctagcctttcaagctaagactttgcagggtaataaagtgaagctctctagtcatttcaaatgagtgaactgttctcacttggcaaaaccggggcctctagaaatccagaagaaattgaattagcaccttcttcattatctctctctctctctctcttttttttttttcgagacagagtctcactccgtcgcccaggatggagtgcaatggcgtggtctcagctcactgcaacctccgcctcccggattcaagcaattctcctgcctcagcctcccaagtagctgagattacaggtgcatgccaccatgcccagcaaatttcttttttgtatttttagtagagatggggtttcgccacattgaccagcctggtctccaactcctgaccccaggtgatccactggtctcggcctcccaaagtgctgggattacaggcgtgagccaccgcatctggccaattctttttatttatttattttttgagatggagtcttgctctgtcccccaggctagagtcaatggtgcaatcttggctcactgcaacctcaacctcctgggctcaagcgattctcctgcctcagcctccctagtagctgggattacaggcacctgccaacacacgtagctaatttttgtatttttagtagagatggggtttcaccatattggccaggctggtctcgaactcctgacctcaggtgatccacccgcctcagcctcccaaagtgctgggattacagttgtgagccaccgtgcctggtcaattatctcttttaaagaaggatttttcttcttacatagaaaatttgtgtttaagggggatcttgggatgtcaaaatgggctctgccttttcaatctgaaaatatactgatgtgatgtgtgaccatctaagaacattgctgcacttgaaatgtggtctataaattattttatagactgaataatgtaatcatcctcagattagaaggccagaagaggctgtatgaggccctcttttcacagaagagccatccaatccctgagagttgagagactatgaccaaaatcaagtgaggggtaaagatggggctggaattcaagtcttttggcttcccatcaaatgaatttttcatctcaccaagctaactctgatagctaggttggatgactatgctgttggaaagtgctgggccttgtaagactttctgattctagctctttttgtgagagaggatgagttttaataactacacaaacacccgatttattctcaagcagcctgtgatgcagggccttggccatacctcccaatgtgtcatcatttccatgggaagacctacaaggagcaggaatccaacatacaaggacatagtgagaagcaaagaggcatgaaagtggataagaatcttagtggtggaagttcgaaaccactgaataatgagaaacttttttgaacacaatgatgtggcacagtcagctgtaaaacatcttcttcctttgttagctttcttccaaagtgtcccagcgacaggctggtggtcaactttcatggtgtttctccaaagaccttcacgtggtgcctcatgacagacgttccttggagattgtctaaggagaatagaagaagcctggacaaacaaagctatgaaaaccacaacttcattcattcctgaaggtttgcattcacaaaaattgcacaaattgttctgcacattgaaaaataacaccaaaatcttatttttagaaagggaatataatgacacaattggggttcctttagctttccaaacagtgcccaacagtagtttccaagaaagtcatgagctagcttttttctaattgtgtacacagttgtgtttgtgtaaatgtacacaactgtatgcatgtacacaaacacactcaccatttaatagccaaaaatccctctaaaatgttaggggaaggaaagatccattttctagttcaagtcatcagtcttaaaattcacagttgggagaaattctgctacaatgaattatgtaaaaaaattatgattcttcctctcaacctaatgtaggagaattgccttcacccacaaatgatcttacgctacactagaactactcagtcagcatctttaattatcatttcccaccagcctctaggccagtgcttttcaaagtttaatgtgcatacgaattgcctggagatcttattaaatatgctaattctgattcagtaggtctggggtgggccctgagattctacacttcttatagttgccgagtgatgccacaacttccagcccatggactaaactttgagtagcaagattctagaccaagcccacttaacactgttctctcactagggcaagaagtgggctacagccaattttatggctaggatggtagacttctgtgaggtgccatattccctgtgaatcttcccctccttcagagataccgccttttgtatcatctttcttccttctcttctgaatgcacttgcagttgcaaacctaaaggagacagcctgttgcactggtccagggagaaaagcatgcaaacttgggtttgaatttcatcaataccacttacaggccaggtaattctctctgagccacatctgtaatatggagctaagatactgtggtgtgatcatatatattggttttcatccacagtccctggctcataactcccatatcctttgttacagtcttgttataatgttgattgtgtgaggcctcagggacaggtctctgatcttctcctgccctacagtcacctgccccaaagcaggactctactctttccccacctttctgattgtaggttttaagaccctcctcagagagagtcccaccctatactctgaagagagataatgctgatatcatgacgcttccataaaaacccaggagggctgggttcagagctgaatatgtggaggttcctggagaatggtgccccagggagggcatggaagctccgttccccttcccccatacttaaccctaaacatctcctcatctgtatcctttgcaatatcctctataataaactggtaaacatgttttcctgagttctttagactacttcagcaaattaattgaacccaaagagagggtggtgggaccctcaacttaaagctggttggccagacgttctggaggcctggacttgcaactcgtgtctgaaagcatggggggcagttgtgggaactgagccttcaacctgtgggatctgacaatatctccaggtaaacagtgttagaattgaatggaagggtacccagatggtgtctgttacttggtgtgtgggaaaaactcccacgcatgtggtcacagaagtcttctgtgttgattattgttgtggtggtatgtatgcagagggaaaactcagtttctgagaatttttcccaaagtggaaatccacccctgagcttgttatggtagataaatgagagaatgtacagcacccagaacagtgccttgtacgcaaccattcaacaaacagcagcaccctcttctctttcttttcaagtatcatgccccaagtcagttcttcatccatggtcccagcaggaaagacttgagggcatagcttgtaatacctatagcatgtaataaaagtcctatggcactggcagttagaaggcaaggtacaatcttcctttcttggcagtaagttataaaacctttatcatgtttttttgtcttctgtcatcactcctaaattggtatatttggcattgtcattaattaactaacacattttactgagcccctattatgtgccagacaataaataaaaaatacagatgaaatctccaaatgcaaccagctcccagattagctagagtttaggtagaaaaactctggataattgattaataaggtcacatcttcttctttcttttttctttttctctttttttttttttttttttttgagacattgtcttgttctgtcacccaggctggaatgcaaagatgtgaactctgctcactgcaacctccaccctcagggttcaagcgattgtcctgcctcagcctcctgagtagctggaattacaggcatgcagcaccatgccagctaatttttgtatttttagtagagacagggtttcaccatgttggccaggctagtctcgaactcccgacctcaagtgatccacccaccttggcctcgcactgggattacaggcacattgcattttcattctaagatttggtgttctacggataggaccttcgtaacagcaaagttatgtcactatggtacagttggcataataaaattagttcaacatataggcaaaagaaatgatggtctggacatcactgggcagagtttttattcttctaagttcatcagttactggtagaaggatcgtgctagaatgctcaagtttcccatctcatccctgatgctgcattcagaagcaaacaccacacctgccaacattctaaaggtggttttcttgttggggaattcaaagtgaaggtgacagcagagagttaaagacattcacttagaaaatggtcactcctcacttttaaaaatgagtccggtaaatgaaaaaacgttagatttacaaattgaatagaaaaaacactctataagaaggttttctggctaaatgaatgaaaggtatccgtctgtggtttaatcacattcgattgaataacggttgttagctaaatttgactttcctgtcaaaattgtcaccatgttgcaaactgactttaaaagactaactagagccagagtggagtagtgagaaattaatacacaaagctcgggtaacaaggaattcatctaaccatccatgtcttgacctctttctaacccaaagtacaaaacttggcaggaagcagatgaggaagtcattaatatgtggaaaaggatctctcaaaggcacatcaagaccctgtgcctttcactgatgaaaatcaaaaggaattgtacaaatatttaccacaagaaaataattctaaaaggtgaaggatttccacaattgacacagagctctgtattactacctaggcaaagtttctggttagtacaggctcccgtgccgttctgaaagtgaggtgtagaggtcagagttcaaggactggccttgagctctttaaaaagataatcaatcagctttgtgtgtgtgtgtggggggggtgtgtgtgtgtgtggcatttctagttaaagatgcaaaaggcctgatgaaaactgtttgggtctttacttgatcaaatcaactgtaaatttgaatatggactcaatattatataacattaaagaattattaattttcttttggtttgatcatggcattatagttatataaacatatttaaaaatatatacagtgaagtatttagtgttgagatgacatgatgtctgagattttcattaaaatacttcggcaaaataaaaaaatgtgtgtgtgtgtgttagcaggaggggtaagtgaaacaacgatggtaaaatgttgatggtcattgaagctgaatgatgggttcactggagcactgcactttctctcaacttgagtatttttggaaattttcacaataaaagattaaaaatccaaaaccacaaaatatagggtttcttaaaaagcactaaaaatagtttacacaacaatactgactcttgccgtgaaatgcagagaataggtgcaaaaacccgagagcagtaattaatggccaatcttatgtgcattcctttaagcacaagcagctgtcataaacatcttaatttaaagagttggggtttggggaatcatggcactgcaaaaagctacgtcctgctgctgctccacagaactggtacatatcagacccttaaatttttaaacacagctttcatgtttttgagagctgaaaaacctttgaaaagtcagcttgttaggaaattcaccttgcagactcctacttcaagggttggtggaggtgcttgggtaccggaaaaattgattttgggatgggggtggaggttcacaggtaaacatgttgtgtgcttcagaagaagctagcttgctctaaatatacggggcgtagctacattgcagtgttgcctttcagcaatgcaaaatataccacctggctagagaggtatttcaagtctacaaagccccacctcccagcctttattgttccttttccagtctttgtcataaaatagaaagaggcggcattttgaagacggaagaagcactaaacaggaagcaggagcctaaaatcgagtttctcatactgctgtgtgttactgtaaacactaggccatgacctgccctaggtgcttcttctgtgacataggatcagcatctcacacccatgaaggtctcttgagtcccttaaggcctaacacacctgaatacatgggctgtgatacgggagctagcctgatgcctccattcaccccacaagatgtagtcctcgccctgacggcaagacggcatgcgagagtcctatttgggttgtaaagtttaatgcgagcagaaagaggcagacgatagctaacataatctaagttaaccattgaaaaacccagactgtccaataaaaatactggaacgaacccagtcaccttttatcaagggtacatttaaccatcctcattggtggctacttccattcatggtcacgcccttccctcttgcctcaggaactcagtatttgtgtgtaaataaggacgtgttgtggtattctgggtgctgatggttccccaggaacttagggacacctgtgtgcagggctgcacttgacaagaaacaaagttgccggcagcacaggacaaggcctcctattaatttctcgaatcgatcctggcagtgattatctggtccaggaaagaacaggtctttgttcatagcaccagatttgaattttttaaaacaacactctctattgcccgtaagaatgactaataacgggcggctgtaatttcccagagtttgtgggtatgacttcttcagctttccttgcatttgaatttgccatatttcgactgggggcttcctagggctttcaagcacaatgtaaccaaaacccccagccagctctcggttcagcctggagaactttgtggtactctcgaacttactacttcctgcccccacacctgagagtctccccgcacactgttttccctgcatcatccaccatcaatcaaacaaacagagaaacacagaaacctcagttctcaagtgcaatcaatacaacctcctttcctggggtaacgatgccttcgttttaaaggtcatggaatgagtcaggggcagaagagagaaacagaggccgtgggttctttgactaaacatctcgcagagagatcggtggatccacaaaaatgacctcattaagctgcaccaattgccgggcggggagagcagtccaaattaacaaaaaatcagagtgatcagaaaacagttttgttattttacacatggtctcaagagctagacaaataaatttgcctagtgtatgttctaagtcacaaatagataagaggaaattgaaaccacaatagccaagcacctccctgaggagaccaaggctgggcttccattacaataatattcttatttatgttttctcatgcacattatttaagtatatatttatttactcatacagaccagatttgttgagtactgctatgtggaattcacagtatgaagtgccgtggggcaggcagacctgggtaccctcaaagaacttggtaaatagctatttcttaactgctagtaaacaagtttctcttctagtaagaaaaaataatggctggaaaacttatttacaccttcaatacacaaggctattttgcacaaaccagatataggaaacatttatatatggagcttttctaaaacagataaaatcagggctcagtcttctttatgaaaacaaaaagtaaaacactttgcaatttgagcaaagattatttctgcagagggtcatctctagtaagaggtgcctgctcctcagaccaagtctgtctctttcagggccattccttactggatggtgactcattttactcaaggactcgccctagacggcgtgcaaccaaccctttagaaacacatcaattgtttaaacaaactatgcctgtattcatttgcttagcaaatcattttgtcacagatttagcccagccagagtctaaatgatcacaattactgaaactataccaataccttttctactgaaaacctatcaaagaaataacatcagttcacattatcattattgattcctgcccttttctcccttaactccattctcttccctttcagtttgttatttattttcttatgttctgaatttcaagaagacttccatgtgttgtcaacatatggtacatcattcacataagtacataaaattctctatatgtcattaaagaactgagcttgtgttccagtgagtgaaactgaagaggaaataaaatcacaaagataaccccacaaattaaggtgcagctaaaatagcagcacccttcccccatcactcactgcactatttcttagaacttttatctttacatatgtacaaataaacagagtgtttctgttctgccttatttgtgtagaggacttacgtgcagctctctgaccttcctctggctctgattagcccctgagggacgtggatcacccacatgcaacaggctgctgacaccagcagaaagctgtctttcagaacaatcaagagtcccacctaaggacatcatgtccacctgctcttctctggttcagctgacttccctggacttgctttcttgttgccctgatctgtgctccgtgccagatctcacaaacaaggctggactctgcttattcctggccagtcttgtcctgtagtcatccaagaaaaatactggaaaggaggaccacaaccttggccagtggagaccctgtcattctgatgaacatttctaacacaagatgtgaagaccctccttcccatttctcatccttccctctccacgtctcacaaacaccaagtctatttcccagagaagtggtcagggtgcagtgagtcaggcagccaaagtaatcctgcaggtgagcatgttgccactgacccttgagtttaacttcttaccagatctctgcaaagatagaaaaaaactagcttgcaagaaaccccagctctctggatgatctgtccttaggctgctgagattttcaagggtgtgcagacagttgaacttcacttattttcaataattataaaaatacataagaattttatgtattatttaaatgatacatagggactccttatccaagaaagatattgtcaaaactagattttataaaaaggctaaccattatacataaataaatggcttaacatataaagttttattttagcaatagcagctacccttagtttcgatgcgcatataggttgaaaaaggtttgctgaaagagaaaaatagactgtttatcatctcaaaactggttgagattgacaaatgtgatcctatcaaaaccattcccccccccactcacataaaatggccatgttctttgaaaatttgtggaaaattacttttttttttgaaaattattcccctcagggcacataaggcgcagggaaaaagcaaaggagaaactaagttaaactagttgagtactttctcagtgtaatgatttgaaacatcaaatccccctaaataaaataaacaatagattatctgcaaataatcctccctggaggttttcacactaaaacaaatatggaataaactcatgagactttatcagagtcacagttaggactctagccaggagtacacacaactccatccatccatcctgccatccacacatccatttattcatctattcaaataacaaatcaagaagtatttattgagtgcttactacatgcaagatcttgctcttggggcttggaggctacaagaaggaccaaggcaagctctcaatccacaaggagggtgagagaaaggaaaaagtttggagtatgtgcagttgtgtagaggtttcttcagtgcaccagagacaagatggatctgtgtggcacggtcaacactgtagcccttgaccttatcttagagaaactaagtgcttgaggtaaagatgttaattcccttaaggcttagcaaatgtaccaaatctgatagtgtgcaatctgtatactgactttacctctggcttcatgttatgattcctacctttgttttctttccacccggatttattcatgaatttttatcttggatactctatgtggtattataagccacctcaaatcctcttgggaaataaaggggtctaaattcttaaaggataaatacaattaccctgctagatcactaacaatgataacaaggatggtaattcttattatcacaggtaactttcattgagggctcctatgtgttgagtactgttccaagcactttacatgtattttcttgtttattctttataataatcttttgagattgttacaattattatccctatcatagtaaaggaaaacgaagcacagagagcttatgtaatatgctagtatgtggtagaaccaagatttgaacccatacactttgaatgtggagcggctccttgtgttttatccaggtgttcgggctctccaggtctcctgatgggacagaagcccattgcttcctgctcggactcagtagctttccctattgtttgactttaggactccgatgctgtgtcctacctagtcttagggaacttcttgaatattggccccatcttctctgatgctgtggccggtttaataggagctcccatatctgagtactgtgtctctggagggcgagctccttaagaaaagagtgggtcttgctcactttctaattttgagtacctggaggcatacatgagccatagcaggtgtttaagaaaggctggtgtgggttgactgaatgaatgagggtcccaccactttccggtgaatactgtgcctgagatcttctggccaccctcccagagaggtgctcccaggtcctggctccctcctccccgctcctcacactgggcccttcatgatagctctgtagcttcatctgcctatgtttggtgagttctacctgtctaggtgacgcttctaaaattaaacaactattaatctgtgaatggtaaagcatatgcattcagattttatcaaagcagaaagcacattttacaaggaaaaaggtctttctgattagcgattataaaattgacttaatttcaatctagtttaccatattcagaagtgccacattcagaattggaatggacacttttaattatcttacgagtttaggcatttcaatgtcttcttttcccccgattcagcttagcacaatgccagcacccctctctttcccactctcacatgggtctttctctatattttctgcgctcttattacctggactatttacttgcttattaatcatgtgtaacttagtgatatgcatcatggtgctcaattgttatttaattcctgctttgttagttcatggcacccatgtttctatcgcccatggaaaaatttttttaatttttaatttttatgagtacatagtaggtgtttatatttagggggtagatgagatgctttgatacaggcatgcaataagtaataatcacattatggaaaatggggtgtccaccccctcaagcacgtatcctttgtgttacaaacaatccaattataatcttagttcttttaaaatatacaattaaattattttgaccttagtcaccctgctgtgctgtgaaatactgttttattctttttgttcttttttgtaccccctcccatggaaatttcttgacaagagatcattgtgacttgtgcctttcgggatctagtcacttgagaactggttccatggtgcttcagtaaaggccatgaaatttcatcaaagactatgtccctcaaataaatctaattaaatgtcctccactgggtcagtcatacgagtgaagtggaagggaggccatatagagcagtcttcaggcagaattctggtcagaattgtagaaattctggtcacaaggtaaaggcaagaaaggcaaggggtgaatggtagtggtggtggtttggggggcacacaacattttttgaatcaccacatcaactaggtaccaggctaaatgatttacacacctgatttcacttaacatctgcataaccctcagatgttgacataatgctgcctccccttctacccataattaaggccatatagctattaggtgatgaggttggggtgtgactccgggtttacctgactccaaaatgatactctttcccctatattgctttcagagtcaccttcacttttcactgcatgcactgtccagaatccccctttaagctcagaatgaaggaaatgaaggttaataagaggtcatgctggcaagtctaagaaatgaatggggtcaggaccaatggagaaggaaagtggaaatgtctgcgttctttgttgtctcgggattgcaaaaacaaaggaggcaaatggtcctaagcaggtcagtaaaggccagtattgagcacctactgtgtgcaaggcagtttgccacagcacagggcacaaacagaattgggacaaggttgtattacccaggctccagcttacgtgaaagccagctgggccagcaggactcatttccctttcgttgctgctggaaaatcagcatccaatcatctcttgaaagaccaaaccaaggtagttcctcagctttgctttgcgtaggccccgcctacagcctcgtctgcatgtgtctcccgtggggctgcagacgcgccactgtgtctaggggcgggtgggtatgcggggagactaaaccagacttcaggcaagcagggggttaatagctcataaaataaaaccctctaacagaaaaatgttattttaattgtattacattgaggagccctgagggtcgtggggtagataatcaaaaaggacaaggaggaaattaaaaaagggaagaaggcaatcaaaaaggccatttaggagaggcccttaatcctcaatagaaagaacactaattatactacagaatctccttataattaaccctgatataaagtgttttttgagcagtaataactttcacattcacaatcattttgatcgcaaactcctgtgaacacctcacaaacagcagctcacacaggtttgctggtttttgtccccagcaagcccagggattacactgctgttcataaccaaaaagacaaatatttctgccctcagctaagtccactgcttcattgaactcacccattgctttcattttttgttgttattgttttgttttgttttttggcaagaatagctcaaaagtcaaccattcttgtgcctccttccccttctttgcaattgcttccctgtgctcgtttttaacctttaatatgacttggaatatcccacggttgcaaaacccactgaattcccaacataccttccttagtgaacagacccctgcttagatttacctacactcctagggcacacattgctgtaatagttcttaacgtttccagacaaaagcaaggattcagatggactctgctcaaatcccatccacaataagagcctcacattcctctcgctgacagctgatcccttatgaaccaaagctctaaactgtcaactagaacattttaagcacagatcagaacaaggaaagaatgcagacagttatagatttcaggggtcccagggtatctggaggcaaagcaactgggaccagtgcacgaagggagaaggtcctggaacaggttgtttgggactttaaaaaaaaatggcgtgaaagtgaaaagaatctgtccctgtccttacatgaaccggccatcgctcttatcccacctagtaagagaaggagcaggatctcagatcccatgagatccctggggagatagtttcaatggggcacctgcctgccaagtgaaactctaggagaggttcacgggcactcactcctgacattcacagcgctctgaaggtattcgtctcctctgaatgcactcctggacctggcttcacctcctcctggcaaatacacagtggacgtatctgaaaggtctacctgctcacaatgggctacatccccactttaactcggagactgggacaccaaggtttgtgaaacactgagcctagtatttttcctctgtatcaaaagaacgaatgccaaaggattttttccatttttccttgcatgttattggaactgaaaaccttacttctacttcccatccgggtgactattcttcatgtagaatttaacaagataagaagatgcttcctttttgcttttttatttatttacctttttagaatcaggtctcattatgtcacccaggctaaaatacttttttgctttgtaaacagaatccataaccaagagacaaatattctcttaccgttcaacaatattaagtatctgcaatatacccatcctcccaactcacccttggacctagacaatacaggataggaattatattgaccctgcttgtgtagggactaggttgctcctcttcagttacctattcagttgaatagcaagttacagctcattaacacagaaaaacataggacattagttcatttccacttaaaaatatccctactaagtaaatcatcattcgtttcatccaaaatacctacagagacacacaattcacttataaagttgaatgaggggattaaaaatgaagaaaagattatgtctcccatttaaaaaatattataagtaaaatgcatttaccagtaaaacacactaaaaggatctgcagaaacatccctgctccattcattaatgcaacaagtatatgccaagtgctattcatttctcaacacctaaaggtgagccaggcacagatcctgccctaaaaaaaacttaaagtgtagtaggggaggtaactcacatttacatataattcaactgtaagtcagagtgcgaaaagtactataagaaaggtgcagatttttaaaaactttatacaataataaaattataatataaatgtaagatattattaattgcatctggtagaggtctccccttgagttatcccatctgaacacagagctaatacgttgttatatccataggcgggatatttacaactccctttgttggggttttattctaggtgtaattaccactagcaggacaggagctggaagccaataggaaaggccgaagctgatgctgatatttacctccccgtttttggtgtcccttgctttgagaaggcaggccccaacactgggttccctctcacatccccccaccccaccccatattctgagttcctcccacctctgttctgctccatcaaaacttcattgacaaagagcctcatggatgccactaaagaggacaacacattaactggaaatgctcagtctttcgatcactttccttactccaacctccagtgatacatattttaaaagagtgtcctggagatgagtctttagccaaaagaaactccaccttaggagaagtggggacaacagagtcaggagtcctggattctagtcccagattagtcactcaatgtagtaccctaggacaaatccatttatgtacctgagcctccattttctccattgttagaattcaccaatagcagactcccaatgtcctgagtatgtaatatgcaatataaagctctcatgaattatgcaaataaatttaaatacaatcatgagagggaattttagtgaggtgcaagggatctttctgacaggaaccctgtctgtattaccttgggtagggtaggtttgtcctgaggcaagacctgtgccaacaaatggcattgaatccaacccaactggattgtaatcatttatacagttgttagttgatttcttcttctgtgtattaaatctaaaatatgaagtctaatccaacttatactttatgtagtcagggttagggatggtattttctatgtaatatcttacctctctgctttaaggctagttgtggacaatagatttagtttttttaaaaattgctagattccttcttttctggttccatttctggaaatagcaacattagcagcactgaatcaaagtggttcttctcacgacttgtcccttgtccctttttacatttatctcctgttacgccagcacaaataaaaccatgaacaagagtaaacagcgaatgttggggaaggagttttcaaaagcagaccttggtatcacttttaaatagtccacagttctaaatgaggctgcaagcatcttgtcttccttcagttgactgcaggagaagatctgtactagatgatgctggaaggtcttcctctatacaggaagacggctttcctcccacacggtttcaggtgtgcacacatgacactcggatgtgactgttagcagctggaaactttgaggttaccaaggaccgtaggaaatgccattcttctcattctgaagaactgaatttggccaaatggtcttaacctttcatagcctgatttcttttgtggttgtcttatcgttcaattaatttaaaccaaccattccttctttaaaatacagaaataatacatgctggctggaaaaatcttaaaaaatgcagtagtatgtagaatacaaatcaaaggagcttttcacttcccctgcattccttaatccttctcttctcttttgaggtcaaacttttaaatataacattttctaggctactttctgtgctttaaatatatgcttaaatacagatgcatgtatgtgtgtgctcacttgtatttctctttgcatgttttcctgtgatcatttcattttacttaatactatatcatggattcatttccaagtcaatatatctatatttggttactttctaacactgtttagtatttacaaggaataaatagaaaggtatgttacaatatgaaaactttatgtctcaacaaaatctcagtgagctattcatataggaaaagaattttttttttttttgacagacaggacagtattttcattgtttctttttaaacatacttttattttaagtccaggggtacacctggtttgttacatatgtaaacatgtgtcggggggttgttgtacggaatatttcatcactcaggtattaagcctgatacccattagttattcttcctaatcttctccttcctcccaccttcactgcctcttaataataatctgtcatatattgaggctaacccagtaagcaggaaagcagcccagcatctttaactcaagaaacttgtgaactttggtgagccatatggagtaaacaactgtcagtgatggtggataaggtcatttaagcaggtgtgtctagaaaagaatgatgccccaaacccccaaacaatacacttgaatttcaccaataaaaattcattcctttggtctaaacatggccaatactaagccttctctttaaacatgcatatgtgtttgggattagcaaccatttagtttgtgggatgctttcctttccagaaaccatgcttccatctgaaaacactgagtgtttctggtgaaagaagattctgacactagggagaggcagacacaaaatagagaagatgtactgaaggaagaaaacagaaaaaagtcaaaacagcaaggattccaaattagccgaagaatcagtcccctgcctagagatggccccaactgctaagaggaaaagttaacttcaggtgaataacattatattttttagaaaggtaagtggtttctttggtgaactagaacagaggaagcaagtagagcaagcacaccaacactcccactccttgtttacagcagacatcactaatctattgtggcattcttggtactccaggcagccactaccagttgactgctgttagtgcccaaaatgaaatacagtttgttattcagtcatgggagtcatcatctccattattagcagccatgagtttgaatttcacaagtagacatgaattgcataagcttaaagttgctgtcagcgttctttttcagccaagtatctgcagaggaggacacgtcccagggaaaataggaggtctctattagctaatgaattaggatcctgccataccaggctagaagttccgaataggcgaagggagagcattgagtaaccagcctcttagaggctgagttgaatggtcatctaaatcaactgtgctatggaataggatgcatctctagcagatgctgggtacacagagttttcaagaatttaaaaaagacgttgccttaaaatgtcttgtttggatagggccatttctgcatatacacccccaaattagattatttttaaaaggttctattatctaaaaatactatgtaacattttaaaatatagtaaccatcaaggaaaacagagactgaatctaacaggaagaggatgtgagtgtcaaattgttggattatataagatggaaaggtaggtgcgggtgagccagcaccttccagattcctgagaggcagcaaagtcagggtgcctgtgcagaagtcaggccaaagcttttctctctgtgggaaatcttcagcaaacagccagttccctgagctcaggacacaccacatctaccaccacatttcaggaggcttacttggagtttcagtgtagaagttgtcctcaaaaaaattaagcaaattaatctagaaagccttaacctgatttggccagcttagttcaactgtgtcagagggaggttgagcaagcccttccagcttgtctgagatgtgataatcattctcattctctctctctctcttaatcactcgtacatatccacccgtggacaaacacacgtgtacacacacccccctttacataaccaacacatgaacacttacacaaccctacataccctgacacgtgaacagttaaacatacttacaatcacacacacacccacatacactcacatacttacagctacgcacacacacgtgcacttacatgcttctataaagactatcctgttatcacccttcagagatgcagattcaaatattgccccataccccatcatagtattttctttcaaaacaaaaactactttcttttgacagaaatctccgtctttgaaagggacactctcataaacattaggccttggggaccgtgtggaaaataagcacacacctgctctgcggccggcccctttattgccaagatggcattagcttgctcctctggaggaattctggctcagaactttcataagttggagactcaattatgcttcttatgagttccctaaatttggaaatggaggtaaataaggaaatgcattagtcaatgtccttctcaacctcctcccctactcatatttcaatcttctccccctgctttcttggggtgatttctttgaattagtaaaaactaccgactgtagaggccaaaaatgaggcacaatattgagatgggaataaggacagtggaggacacaaatgccaatcttacttatgagtatgaccagtctgtgtgggtaaatccccagggcatgcagtttttgcgtgggctgaggcaactcatgtcatgccagacttcactgaagagtgagcagtgttactgtgagataccaaggaaataacacactttgacgtgagatctttagattttaattaaaatgcaaatattaatgttgtcaatattgggggattaaagaggatattccccatgaataagtactgaggaagaaaaaagaccatgatctgaaagttaaactgtatgatctcccataaaaggggatggcagagatatgcaaagtcactttactgagcttctggaaggcaaaatttgactggaagctgcctgaatttacaaatccatcagaaggaggtatgataatcaagcatggccatgggagcagagagaaaagagttatggaaacaaacgtgggcaatggcctgctaggatttttcaggcctaaggacccaatcagttgttcccagtggatgggaagttgagttgcccaacttatgtgtatccaactatctgcacacaggtgagcggttagaataggggcagagagagagagagagagagagagagagagagagagagagaaagagaaaggaatgagatgggaatgaggaaaggaataagaaatgaaaagagggcaacagagtggcagagtgggaggagagagacagagagtgagatggagatgagagaggtgactcttaatccttcatcagcctcttgagcttctcagaagatgaacatctctctgtgctcagcaggatttttagtgttaattacagctgctgttcattcaatgtgacccctaaatcagtgttctccaactgaggtctttgagccaacagcatcagcatcacctggaaaattattaaaatacaaacctgagtctctccccagtcctactgaatcagaaactctggagatggggcctctcagtgattctgatgcacgatgaagtttggggaccactaccctaaacacaagccaactaccacatctggagctccactgaaaaaacagctggagaaatctctcttcttaaataaacactgtaatattctgattttaacacaggaatgattattttatatatcagttttgagagcttgagagatttgagtctgctctctcatctctgaacactgcaaagacaagacacgtttttgagtctgtggagctgaaagtttgtctttgtaaataggagacaggcaccaacataatggcccactgttagatttcttgggaccccgacctctccatgtcctgcgtgggtacttctctgttttcacacacttaacagaaaagtaggtttccctgatttgagagagatccacaccttgataacatgctgcagaaagatacagtatactcttccaaaagactattcagcatggtgtaaatgtaacggcaatcatgtagagactttgaagtgacagatggggctagaaatctctgtgatacttttggcaatggctaactaaactgttttcctgcatttctaatacatcaatctgttatttgtttctagcctgcttttattgtttcattttatctgctatttgcactcagacttgacttgcagacaaccatgggcagcacagttgggtataaaagagagttatttaatggtgttatttaaggtgtgcaccttagccatgcagtttacaaaagcaaatctctgtgaagtacaaagcatcagagagcaaaacaacagtcactgacatctcttcagaggagagaaagaagctgagtcactgagcctgcaattcaagagaaggcaaatatatcacagaacaaagaataaacctccaccctgggtcacaggacatctgcctcagagatgttcaccaacacagaaagatttgttgcttatgataaaagacatctgtgacaagacatactgaacaaaggattatttgacccctaactaaacatagctgctgtataaaaggttgtttttttatataatattgccaaacactatttctgtagctcttttaagaagagggagaacagcaagtgttattaaatctgtggtagacatcattctaaactgtacctgggaaagcatatgacacctccatcgtaactgcctaatttgctacttagggatagaaactaatgctacttaattgaaataaaaccagatgcgctgctgagagcctaccacctttagaattatgctaagcatcacagggaaaaaaggaaaaaaaaaaaaccaagttgcacttcggcctccagaagagacaaggtaaacagaaggtgagttcaaaaatgtttgtatttagagaactccatgtgaattggaatgtggcaggagaagctttcatagaagagatgaactttgctcagtgggtaaaatttcacaaggcagtttggcaggaaacacaagcaaagcagcacaatggattcaaggctcagtggttttgaagataaaattcaatccctcacttccatttgggatgaaatattgggaagcagcaaaagtgtcaccagcaggaaggtcaactcaccattggagacagacttattgacttgactggccaagcccaatttaatcctccatccccaattctaaacacacagtagactagatgtacccatgcccttcacaacacacgtttcagctgttacctctcccaattatcttgcttacctgtcaactttaaggcgtcatctagggatcaagcagatgccttcagaagccaggactgagtctaggggaggggctgaacaggttacagggctgggggattctcactagggatgtcagttcactgctggctaagagtggggcccagattcagtcttctcctttttttcccctggtcccaaagtatcctggaacagtgttttctggttgggctatgagttttcatggtggcaatctcagttggtacaggaacctaaggtagacggcagaggtgctagcagcatggcgggaagtcagagttattaaggaaaatatccgaaatacaacccattctgtctccctcttccaactagcaataatcaggaaggcccttcagcttcagtaatatttgagaaaggactcctgcacccagaggaaaacctttgcataggccagcattcggtttaagacttttggccttgtcctctcagttcatgaactctgatttgatattctgttacctgaacaaactctgatctgatatatatttttttcttcctgaaaaagaagtgcattggaggtatggtgatttccagagcatctctgaggaagtgtaagtctgtttgtgtggcccctgtctaccatgtattataatgatttatgggtctgcctcgctgtcccctactagagtatcagcctcaacactctctaccttgctcagtctaaaaatttatactggggaaacattcaataaacagttataggcatctacggccatacctccctgaaggtgcccgatcttgtctgatcttggaagctaagcagagccgagcctggttagtacttcgataggagaataaatagatacaccttggctaaaggaacatagcggtgagaattcaagttcttgccaccttcccaatgcctcgaagacagaaaactgaggtcttgctagacctttatttaccaccgctccttaccactatgtcctttcctagagcccaccggtgcagctcttcctaaatgcctcagcatccaagtgtactttcagacctgaacccctgcagtgcctttatcctggaccattctgctacaaccatttcatagctgtgcatcactagaggggatgccagtgggtggttagggaaggtatcaaattgcatggaacaggagagggtacaatcaggtggatcatgttgtcactgctgttggacggtctcgtggtccaactgcacacagcccttctggaaaagtgatgatgtctacttctacctatttccaggaaaggaagttctataacttcaggcagacaattcctatgtctaaaattcattacgtcccctagtaattgcaggatggtgctcttggaagagcaccacctattggcaaaaagaccaatggaaggttaacctctagactagtgcttctcagggtgtggcctctggaccagcggcatgggcagtacctgggaactaggttagaaatgccagttcttgggtcccatcccagactgactgaatcagaaactctgggcatgggctcagcaatctgtttttaacaagtcctccaagtgattctgatgctcactcgtttcagaacccctggtctatagaatgggggctataagcgtcatgtgtatatatcagttgtcaatttagaattacctgtttgtttggctcaggtttcttctgtttattgctgcttgttaggaagagatatcccctgcattccatagattgtgtgaactgtcaactggagaggatgggatacaattttcacaggccactgggctcctggaagctcaggctatttgacttcgaagaactacacacaagaccctgattaataaatttgtcaagagctgctcctttttgtgacaattctagcagagacttcggtgacagccgtccacttttatggattttaactgagtaattaataggataacagttacaagtgcaagttaagtgcgtattatttctcctggattgggtcataaataagtaatatagcttttggaagtgaatgggaagagacgcttgaaaagaaagacctattgggagctgaatgagggagtccagacttaatttgaagctctaccttctcattttagtgaagcaagcagttccacaagggataagccgagaccgtagcagcttctgtttcactttgtgcttcagctatagccaaacatcgacaatgtaccaaatggagacatttttgaaactgtcctcctctcacagatattaaaagcaaaaacaactcttcaatatgccagaggtaagaagaaaggaggagcatcagcaaagactgaggaatattttacaacacagttacacagactattacacttttatcttttcccagatccccgggctgactcctgccccaaccacaaattcctgggctgctctaggatgtaggggccactcacctgttccaaatcaattcagggcctcagggccacatcacatcttttgtgggccctgggtgcttttggcttcacaagccctttctccataatcaaaaaataagtaaaaactacattttatgatatcgttggtattaagacaaatataatccaggctggatttcatcattatgtattcattattcttacattcatttttgtccttctgatttgaaaagaaatgaaaattaaaatagttttgttggtccctaaaagtcctgtgggcctgtggtcgtttcctacgactgctggaacaaagttccactcactggtggcttacacagaggaagcgcattgtcttacagatctggaggctggaaggccaagatcaggttgctggcagggccatgcttcctttgaaggtgctaggggaaaatccattccagtcctctgtcctagcttctcaaagtcctctgtcttgtggcaacataactctgatcttcacaaagcattctccctgtgtgcatctgtcttcaaatttcccccttttataaggacaccagtcatgtccgattaggggcccaccctactccatgatgacctcattttaacttaactaattgctcggaacagccttatttttcaaataaggtcacattccaaggtactggggattatgatttcaaaatataagttttgaggagggggacacagtccaacccataacccagggctgtggccttgtatctaatgaaaaagtcacttctttcaaggacgttctctgagattctgaaggcaacgtagaaacccggggtcttcagtagcatcagaaatgtgataaacacccaggggtggggagagatacatttttggtttggggctgggcgcagtggctcacatctgtaatcccagcactttgggaggcccaggtgggtggatcacttgaactcaggcttgagaccagcctaggcaacatggcaaaatcccatctctacaagaaaacacaaaaattagccaggcgtggtggtgtacacctgtggtcctgctactcgaggggctgagtagggaagatcacttgatcccaggaggcagaggctatgatgagccctgatcgcaccactgcactccaggctgggtaacacagcaagaccttgtcgcaaaaaaaaaaaagttttttttaaaggaaatacttcaccacacttccaggaagattttgtgtggaccaactcagtctgggggaaggtgaacttctctcaatgccccacttcatacaagtgccctgcctcggggacctcccagtctctgacttaggagcaaaccttcctccaccttgagcttttcatcctgcacatttaccgcttgtctctgggagctgagccccactaggtattgaggaaggaaacgatttctttttttaaagaaatctgattttcatggaggccttgtacttctcgtgctctttttcccatgttaactttagcttttttcctctcctgaaagaaacactcagcttgcccctgggtcttaactgacaatccaaaacagaggaggaagaaagagaggttccatccaaagaaagagatttgtccatctcccctggacaccaacctctcttctcctcacctgactcctctcttctattagaaaggagagaaagggagcgggggaaactggaaaggggacttgagattatcactcccttttttttagcttcagttttttttaagttactatcagtccatggcaacaaaggcctctgaattctttctgtctgtggctcaatggtttaattatcaaaggattctataaaccccaacaacgtgtgggctacccagttcgttaccccccgcacttcagaagaaaaatcacctcacacaaaaacagccaaataaagttgcacagtccgagaaggcccatcaagcgagaactgaaacagtacatgaactctgcctgtccatttaaattgcaaaagctccagctcattcgcagacacagaattcggtctggcaaaaccattcacagtcctggatgtgaactggagcctacgacattaaaggcaccaaggacaatgccagtgaggctgtgtccaaagctggactatctccatgaaatggttctctctgagcaggcagaggtaaataacagtaattccttcgagagtgtgcatgccagaaatgaagagcttgaagtttatgtggaggagctgttgaaaccaccccaggaagactttttctctcagcacaaattataataaaaaaatctcagtggcactctgagctgtaaatctcttaggttaacttttaaaaaaatgtgacattgttaggtacatacgcaggaccaaatgaggtatttcttttaactgttctgctcttcatagagcctctctctctctctcacagctttggtggttttatgaccatactgaaggagctagcagaatcctgttgctaccaatagagggtgggttggttaacctaacagactgacccaaaaggttgggcaaaccccagtgagaaagcagctgtggcactttttgaggctgtgcaattggttcacctgtatttcccgtgtggtgttgaaacaattgcaaaatataagcctaggcattcttcttgggcagtggcaatgctgtggtttagagtgaatggacatcccatgctccaagtcagtgataaaccgcttgagttatccccaaatcctctccaaatgcttcaagcagctaatgttacaacactgaccattaacaaataatgtgggacaggaagagaaagttcagtgaaccaatgactcaaattcaattcccagccagaaacttcatggtgcacagaggacagtgtcctaaggaacagtggctcttgcttaatatgaccttcaggctttctttaccttgcaggggctgcgtgcgctcccaggcttctccttccctcaaaggagaaagactgtttactctgttcatatgatctctgatgataagagactcaacaggccatgggcttcaggggttctttcttgatgctatgaaaaccaagatcaggggaaagtgagatgggtctatgcctccttgggtaagagcttctagagaatggaataaagcagaggatagggtcagacagactgaaaattctcagagggttgtgttccagggcagagactgctgttggctcctccctgtctggccctggaaatgtagaggtttacacctgggccattagtaaatgccccataattcctcatagcagatctagttccccaaccttactgcagaggcatgggagccgcacctcattggcctaatggactccagggagttggtcaaggaggtgcagccctctccctggaaatttagagtctcagggaacttctcactgtcttcatctcttcattattcaagtgggaggcctcaacaaccttgtcttctttccacacttcctgcatggccgcatggccacagctgatcccctcactcgcctcaaaccaaccgtgcaaatctccttgggaagcaacatgccactccctgccaagcctcctctggacagcgcctgcgagttccttccctctccactggacaaaagtttctctcacagcatttctgtaacttctgaaacccaacctcctccaagaagccattctagattgattagagagaaatgcaaataattcctgtgactacaactggagatatatctatatctatctatatgtatagatagatatatatgtgtatgtattgggagttattatcttcaacagccaccaagtttcttggtgtctcctcactgtcatccacattgaatgctgttattcttttaaaaagtgaaaataacttcaatgtttgagtgattataaaaatgttatatgctcacttaaacaggtagatatgtaagtgcagaaatctattcagaagaatgtgaaaatcacacaaaccccactacacacagagtaaacttttctttatctgagaggtaaaaatggtatgtgtctatggtgtacaacatattttgatatatgtatacacagtcgaatggcaaaatcacagcaagctgtttaatatgcattacctcacagacatcatttttgtgatgagaattcttaaaatttctgatggcaatttgtaagtatttattattattaattgtggtcactacgatgttcaatagatctcttgaacttattcctcccgtctaattgaaattctatgtcctttgatcaatgtctccttgatccccccaagcctcagtctttgctaacactattctcctctttgcttctatgagtttgactttttaagattccacatataagtgagatcatgtagtatttgtctttctgtgcctagctcattatttcactaatgtaatgtcctctaggtccatccatgttgttgcaaatgaccatgacttccttctttttaaagtggaataaatagcattccattgtatattgtgtatatataccaccttatctttctccagtcattatttgatggacacttaggttgatttcatatcttgactattgtgaataattctgcaatgaaaatggggaggcagatacacagaaacaagttatatgatatccctatttatgtaaatgcattcattctatttttttttttttttttttttttagtctcactttgtcacccaggctggagtacagtggcacaatctcggctcactgcaacctccgccccctgggttcaagtgattcttgtgcctcagcctcctgagtagctgggactacagatatgtaccaccatgcccggctaatttttgtatttttagtagagacagcattttgccatgttgaccaggctggtcttgaactccttacctcaagtgatccgaccgcctcggcctcctaaagtgctgggattacaggcgtgagccaccgcacccggctgtaaatgcattgactcatgactgatactggttctatgatgctggcaaaaattaaacttaggctaatttccatagcaaaggttaagtagctacttattaattggccctgtttacatgcctaccatgaaagaattatttttaggcttaagtggaaaccttaagcttgactaagaccatcataagaaaacagtgaatagcatatctacttgaagtggaagatgagtgagcttcaatcccattgtcactctgctatagacactgataagtcttataaaggcagaaaacactagtttgagtgaaagaatgactgaggttgacaaaagaagtatccacaaggcatggtgagtggatctgccaatctctctgcccatctccagacagtatgactctgattctaagcccaaatttagtgggaggctctgccgccacatcttatgtgctgctgggcttggtgaaggttagcagtcactgtctcagttacatgcatatgtgacaaggaaaaagtgatttacagcttctctttccctcttgtcttctagggagaagagaacttccgtccaattttatcctgggccttatttttccaatcagagtcatggaatggggatgaaggagaagaataaaaagaagcaagaccatttggttggtttccattggagaaaccagactcacaggaggggaaatgctagatctgtaagataaggggtgggtgagaaaaatataagaatcagaaagcactagggttgaaaaaaaaaagttctgggaaacttcctttttttttttttgagaaggaggagtgattaaggcagctgtcatattatgataggtggaattttgaggagatagatagataaagagatttttcagaaaatctgccgtaagctgtggatggaactcttcctttagcattttctgaaagactgtaataaagatatacgttgcttttaaattatttttgaaaaccaatgtgtgcttctttgggaatgacactgtgctgacacgggggacatgaggcagctccatttcatacaaattagatagaaacagctgtgtcgtttgcttagggctctcagtttccagaggacagactcccatacccatgtagctgattcggttatatccagggaggcatcttgccatagttacaaaagctctgaagtaggaacctgaagacctgcatttgagtcctggttctccctcttaccagctgtgtggcccaggacatgtcacttacgctccctgagttcagtgtcctcaccagcaaactggggggcaagaatggtgctatgtgcctgcaccctggacttccatgagaatcaagtaagataagggtatgccagcttgctctgaggactgtgaagagccacccaaatcattactgaggaaggccccttggacagcatgatattcagcaacttactgtcctggtgataacaatggtggctgtgatggttctgagactgattctgcccagggccattaacaattctcctctactccttcctggtatcttctctgagtcgggagccagggaggaataaactcagtcctaggaaacctactgggaactggacaatttccccacctcatttcacccggggcctccaccactgattaaatggaaatgctggagggcatgatgggcccaggccaggattctcttgaatccagcctatgcctggccaccgcgccctgtgctgatggtgacttcacccgctggctcccatctcaatggacggctctttctgaaaggccattttgtgactcgtcttgggagtgcttcattcatgctggctgaagttctttgctcaaaattaactctactcagcccaaagcagccaaaaagaaaccgaatgagacagcagggagtgaagacctcgcacactctaaatttgcttccaggggagttttctctgctttccaggattccagcagaatctcatccaacctcagaggcaacggctaggctgaagccaagagcccaccttctgtgaagtcctctccccatacgttcccgtcactcccaggatccgcatcttcctgtgcaaaagtcatcagacacatgtccgggtagctacctgctgcctcagaagcagatcttttctttttgtttttagttgctgagaccaaaaacttggccgattctgtctctggtctgaggcaagagtccttgcatctgattttcctaagaggcagcccagaggctggtcaataaggagctggcctgctttccttggcctcggcatggccagagaggccagggcccaaagcagcaccaggatcttgaactaagacacaggcaactcatttcactttcctggccgcctcaacacatctgtcttgttggcctgtgtctaaacctcttgagcgattccagctgctgagccatgcctgtagacatggcgacatttggtttctgttaaaacagaacaggtcagtgtgttcacctgcttcatttttttccctcctgcacaaggacagggacagaggcagccaaaaactgatgctgctgatttggagatctcccattctgtttcagtgacctcatgccttggactggatgccgctgggtcttttaaagccgcttaatttcctgtgtatttccagcactcagccaaaaagaatgtacactatgaaaaaaatgtctactacccctcaattgcagaccctctggaaaaaaatatctggaaggcttttaaataaaagaaataattacaacctgctgagtgccttacagaatccatgaaactcgaccttttccaaaatatcatagtatttcctgtggcttctgtaggctaagccttcgtggatttataagtatgtgtccaacacagtctctgggctccattttttaaaatccaaaagtcagagttgaaaagcacaaatccatactcttggaagacagcatcccaaaaggtgttaagttaaaacccagctgtaaaaatataggctgccagctgtcaggggtggtgggccatgtgcattttttttttaatttaatgaatggaggtttgatcttccagcttgctgcccagttgcagcttttcagatgctgaacatgtcaggtatgccctgcaggtgtgtatagtcaccgcttacaactacatggtgggtggagagtggtttatgagccctgagattcataaattctagtctttagaactcgcaatataaggatggttaaaaattggaaagggagagaaaaaaaaacattctgaccttcaactacctgtgatcaatgatgcagactcctggtagccggtcccaagagaaaactgaaacctttgaaagacaaacccaaggagacagaagtttctattaactttccagaagaggtaaagattctaagcctgggttcactgtacatgactgtgtcttgctatgactgtgtgtggacagacaagatgaactagagggtgtacaattacatggatacttcgtcttgcatagaccacctcaaatatgtggtcataaaaaatatctttccctaggtgtttttgaaaaataattcagattattatttcaacttcatgctgtaggttgcctgccttagttaaacccgaggaactagggacttcatttccagtggggaagagtcgaattccatatcaaattactctgaataaaatagtgagtagaaactcaccgatcgactctagttagtgtcagcctcaggctgaattgggaactgattaccatttgtgttcacagtcttctgccctccccttttgttcctcttaacccccaatgttagagaccctctattaaagcttggcagcaccccaggctggggaatatccccctgctcaatctcttctctaagaaaccaataaagtgattttggttaaggtgagaacagctaagtatggcccacctcccagataacagcaatgttttaatccttaagggagagttcaaaaaaagtcaaaattcttagaaacaaggcaagctggtgaggaagatctttttaactgggagatgggcatgttcaatgcttcttatccaccagcttcaagggagtatgagaacactgcctgagagatgggagtgtacagatgaacttgatttactccataaatcaagggtagggttcgagtgactggaagtagagcaaagatatcgaaacagattttttaaaattggcatctctttacttagcctcgatctattaaatagaagaatacatacaaatatttttatacagaaagaaaaattctaacatgctccaatcacctgccagagacactttataaacttactaccatttggacttgcttccaccatttcagaatttcagaataggtgaggctttcccatgtggaccacaagaatgactactgtgcacaaggagaggcggttttgagatgcacagtatgtgattgctggaggacacaagcaaggcaaggagcagaatatgcaaacaggccatggtaagctctcagatgaattgtcttgggctcccagttaagctacaaatctagtaggtagaacctttcttgtttctacgcctctattttagggatctaattcttagtaaagcaactcagaaagaaaaaaaataataatgcttctttgtttctaggacttggccttttgttttataattaatatagattcccacccaatgcataaatgtttaaagcatcatttatattgcattgcccacttgttaaagtttaaaatgttgcaaatggccaagagtctgtgcttcagttacaagcaaacttgctcgccccatggtcttaatctccagcaaacagtggcataaatgaacctctgggtcaactttgtgtttgctgcacatcctttgccattataaaataagatgaaaagatttgcttttaagtcaaagcctaatttaaaatattttaagtatggacataaatgcgctggcctaaaatgtgtgtgtttgcacatgtgtgcacatctatatcatatagtttacatagaaatggatgaaaaaagtagtcctaagccaatactgatataattagcgaaaaaaaaaaaaaaaacacacacacataaggagacataaattagtgccttcagacatagggattattttgttaacaagggaatgggtccagagattgaaccatctgcattcaaataaagtaagaggttcctcctcacgtggttcttatatatgttaatgtttcacacttctttgacttatatgtcaactcacaggtggattgtgcagtggcttcaaattaaggcagcctcttagtcaacttgtcctgagctgggttcttaactaggttcctgaccttatgaccttatgaccaacacagctcctggttcagtaactgagtccttgttcagttctatcctggttctccttctaggcctcccaggtctcagcctggtttctttgaatcccactcttaccaccctaatttttaggcagtatggatttccattacagggttataatgcaggaagcatggcattgataacgggaagttggggtatgtttcagcaacacctccctgtttaagggggagatcagtctgcactagtgggagtgtttgtattctagaatatttttaaaagaggaagctcgagtgttttccagtacacggaggaactctagatagctgtgaaggagtttcccggttaccttaatcaatgtataagtgattgtcaatattttgtataatagataattataaattttagtaaatataagaatcaccccgggagcttgttaaaatgcacattcctagagtccatccccagggatcctgattcagaagtcgtggggtgtagtttatgagcagtggtctttccccctattctctcttggatggaattttgagaaacatggctctatgccttcattgaacaacatccacctataaattacaaattttaatttcatacagactattattgttataaaaatatttactgtctttaaaagtttagtacatcccttacaatctcacttgcaccattaattcttccagtaaattatttctctaaaacatagatgtaaaacttaacgtagcctgatccagattgaattactgcaaattgctctaagcagggatgaaatgtaaattaatgggatttctgtaaatgcttatttttttctaactaatattctatggtggtgagttatgatatgtagtcaaatattgaactgttttagctattttaggagattaatttacactagctaagagagggagaataagttgatgatcaatttaagtaacccttacattaatggactaaactttgtgggaaaaagtaaatgcaaaccagaattgcccaggtaaatgttgcaggctgtctgttagcacacttagacactgtctccttttaccaggggatatgatggagagaaactctgttccctgattttaggcacctaaagatctaaatctaaataacaaaaacaataacgataatagctaatattagggctgggtgcggtggctcatacctgtaatcccaacattttggaaggccgaggcaggaggattgcttgagcccaggagttcaagatcagcctggacaacatagtgagaccccgtctctactacaaattacaaaaaattagtctgacgtggtagtgtgcgcctgtagtcccagctactcaggaggctgaggtggaagaattgcttgagtctggaatgtcgaggctgcggtgagccatgagtacaccagtgcacgccagcctggcaaacagagcaagactctgtcttaaaaacaatatagctaatattaatcaaaacctttctatgtgccaagtatttttcatttattatttcatattatcttcactacatccctacagatggatactattatcagctccaatttacagttgaggaaatggaggttcaaaaaggttaagtaatttgcccaaagccatacagccagaaagtggcatagccaaagtctgactccaaagcctaggagacccaggtcatatctacagctgagaaaggactcactctccaccatgccactggtctcctcaatcagtatttcctttgttttaggcataaactagctagctaaaacctgcagtttgaaaagttcatgtcaaatgaagtgacatacagagaacaattgtgcagataattttctttagaaaacagaagcagagaaagaatcccttttaaaatttcagtttcaatatatttttgcaagcatatttttgtcccagatgctaccgtgttcaaccttgtctgagtctggtgaccaaacctcagtgagcgttctgtccaggtatagcagctgttttgggcagcctaataattaggctctctatgtatataatctttcaaggagagaggacatcaaactgagattagattagaggaaaaagagcaaaagaggaccatggatagtaatctattcccttttgtgatcagcatgtagaaaacagtttcagaaatgtattttcatttttcacttaaaaaatatttgtattttaccttcagggaaggtattcagtattctagcagttgcttcagaaagagggaattggctggcactgtgccatgcatgcttcatagacaaagccacctaggtccataaacacagtcatctgaggggcgaagggcagggaaggattcaagcaccttagttccaactccaggttggatgtccctctcgttaccccacggtaaaaggattatttcactccactgtgaggacttggctggcagaaggcattttcaggcaggcagtgaggagagcagggaagaaaggcaggtggggagcagaatccaagacagtgcagagggcctgggagaccaggagaacagggacagcccacagtcagaggccctaaggagtatgtctcctaagagccttcagctgaatgtcctttccctccccatggcggggcatctctctctacaacctgtccatggttcactttgttctgcctccttcaacagtgattctaaccctgttgtcatgtattgattacttatggcaaataacatcaggaggaattggcagttgcgtgaagatcagtggtgggaataagaagtgggactagcaggaaacggatcaccatcattagtatcattattatttaattaagctttgctattacaacaataaataataacaatgagaataataataatgacgataagctagcatttagtagaccaggcgctatgccaatcattgaaaatatgcatgtttatttaaccctcaggctattttgatcagtattttctttatcccactttacaaatgatgttgaggtgtaaagagataagtaccttgaccaaggtcctgggcagctgagtggtagtgctggggcccagatcccaaattctgactgcagactctgactccagcacctgctttcttgaccactgcgggcctggctttcacaggtgttaccttcctgcatcctctcggcaccaggttgagcttggtgtcgctatcccttcttatagatgaagaaactgaggctcagaaacagtaaacaatctgcccagggaggaggaacagagctgaggaacaaaaacaggcctctaagctcctctaccaaaactgcatagaccactctgtaaaacactccaagtaaggatgggactttatttctcacccctatgactccatgtctaggtagaagcagaagagtttgggaagagatccgacaacatgtgtgaggagatagggaagctgtatgcatttaacctatctccagggtccccatcacttgagagaagggccatcaataaggaggtggagaaggatcatccgagctaggctgagtcttctttgacttgctaaaaaaaaaatggggagggagaaggcaatgggctagtatgggaaagaataaagaagagagagggcagacatcaggaaagaacatcaggcagagagaagcgtcttagagcagtaatcacaaccaaaattttgcgcaccaacaaaagcccattgacgctcagacacctctgactttccccatttccttcccgatggcacaaatggaagctctgatttcctctttccttttccttctggctgatgcatcctgacaaatacagtatgtaaagcgcagggacgtgtgaaaggaaagtgtggcgacggttgttttccatctcccaataatagcgtttcaatttggtacctaaataaacaatctattttagtggctcccctttgatatctccaatgttcccttctgttatttctggcagttcccaatcctgtgatgtgattagagaggatgattacacttacataacagcatcaaattaatttgccgccgagaacaacagcggtaggaaatcattggagttctcaaattgctccccccacccccacccgcctcgagtttatttaagtgacatcaagggattagagcgaagtcggtcagtagagcactgctgggaaaacaaccaaaacatcgactctgaccttgtaaacgaaagaggaacagagcaaataatgaatagcgctggtcccaggcctggtgcaggggccattggatgaatcagcctcccaaacacacatttccgtctgtctgtgggagaaagaaacaaactgtacctttcagtgcagattagattcattttcctggggctatgtccagccatccagggactgtcaaaaccaaagatatttgagattttgcttatgtttctttgctttgctttttggccccttttcaaaacaacaagaagaatgtaaaagttgacttgaatttttttactctgtgagccctgaacaaaagtccagaaaaataaagcagaggcaaatattattgcttctggttttctaaaagatatgacaataacagctcagaaaactgtagcccatgattccaccaaaggttagaggttcagaacagggagcagcacgtggatggcgtagaaaagggacccctttaagtcctactcgcagtttagttctgacacgaaccttcaacagttacttcaactctctgagccttggttttcttacccaagatagcagatattaccgtctttcatctctgttacagggtgggtgttcacccatccgttcattctgttaatccatccattcaacaagtatttatcgaacaccaattctgtctcaggaactctgctggtaactgggaataccaatggacgtggtcagccctaggagcttatgtcctagcggaacagggaaataaaaacagccagtgtgctctgagggcctgcatgggcaggcactgacctctccacccttcatcccttatcacatgtgaatttcacaaccaccatgcatgcgtaggtatctctgtctattttacagatgaggaaattgagcccagatgtgttaaataacactacgccaaatcacactaggaagcaatgagattgaaatccaaacctaggttttcagaatataaagccatgctatatccctttatattttttggaacctgacaagctctgaagcactctgcaaatacaaggaactactttaagtgtgtttgcacaagctgttcatatactagacagacatcacaaatgcatgaatttctattgctttagtccagtgattacagcacttgattctttttaaagcaaatccacttctattatcccgtttgatccttgtaacagcatcacgatacatgtggagcaagtattattactcccactggacagatgaagagaccaacattaagcaactggccaaggcccttgacccagacccggaacactggtccgtggctactcacttgctcttcttcctcaacctcctctcaatgagtctgaataaggatgatgttttcaattttggcctcaatagaattatggttacttcctatattgtgttagtcttttgagtcctaatggcatccctttttgggtagaaatccatattcacaatatagcatgaggtatttttatttgtctgctttgaaaatcatcggctgcttttccaccttgtgagaacgtgtcacattttcccatcatcttttgtttacatcattgtttcactaccatggaggtttcgttgtgcattcttctcacttagctcttttagaagactgctcttaacaccaacatatggggtttccaaagttgggattactccagttagatgaatttgaccctttgttccaaacaaactcttgctaattccagctgtactgtagcatccatatcatctgagtctgcttgttcatacttctcttacttcataaaatggacatcaaaaaattattagggctgttttagtctcatggcttaattccttcctagttcttctacctgaaatgcttgacccccaactttgacgcccttccctcattcttcagggacaactcaacttccacatccttgaggatacatgtccacaatacctctgccaacattgacatccacctcctctgaatttccaaatcccatagactgtcagaggtttgctgcacaggcacattggaggagctctggtcctagtcctttcttatacagatgaggaaactaggacccagagagggcaaatgactttccagttggtggcaaagctggaaatagggctccattctcttgcttcttgaagctagcacttcccttcgactcctttctctttccttctaatgtctgtggaatgtgggttgtgtatgctcagtctggaatggatatctctcttattatccccgtaaactcagtgcacttcttgaagatgagagctgagtctttttttttttttatatatactttaagttttagggcacatgtgcacagtgtgcaggtttgttacatatgtatacatgtgccatgttggtgtgctgcacccattaactcgtcatttagcattaggtatatctcctaatgctatccctcccccctccccccaccccacaacaggccccggtgtgtgatgttccccttcctgtgtccatgtgttctcattgttcaattcccacctatgaataagaacatgtggtgtttggttttttgtccttgctataatttgctgagaatgatggtttccagcttcatccatgtccctacaaaggacatgaactcatccttttttacggctgcatagtattctatggtgtatatgtgccacattttcttaatccagtctatcattgtcggacatttgggttggttccaagtctttgctattgtgaatagtgccgcaataaacatacgtgtgcatgtgtctttatagcagcatgatttataatcctttgggtatatacccagtaatgggatggctgggtcaaatggtatttctggttctagatccctgaggaatcgccacaccgactttcacaatggttgaactagtttacagtcccaccaacagtgtaaaagtgttcctatttctccacatcctctccagcagagagctgagtctttttcatctctgaatcccatagcattttccacaaacccaacacatagaagctgttcaagaaatggttgtgggatacatgattgttcttcatggaaacgatctgccttttcacctacaaggttgtttgctaactcatctcctgtttgttccctctcttgttcttgcagcagtttctctcctccatgcaaatcatgtccactccattccatacctctgcagaaaactctgacttcggcttaacctgcattcattcattcactcattcatttattcactgaatatctgcaaagtgtctgtgctgtgccaggcaccgtcctggtacaggggatgtagcagtgaacaaaacgaaatccttgcccttgtggggcttatcatccctcaatatctccaccttctcctaagtgacagctcccaaactgagggaaacccagggtttcacaaaaaaagtttctgcaatgttcatatcattaaaggtgataatagcagatattttaatttctacttaaataactggatgaatgtagtgaataattacatatggttttcatttaaaagagcagagtttggcatcacctacctgtgctcatgacttcgtcaccctccaccattgggtgaggagctgaatgttaccagttattgtggcaactgaatgacgaggcaatttaaaatgtttatttttggttaattgtttaattgattaagttgtctgattcttacccacagcgggtttttggtaatgacaaatagtagaagaattctgaagtaaaatttgaaaagtttataaagactgtgcatctgatgataactttataaatatatgtcaaagtattcttcactggatttcagaattgcatttacctgtcacataacccattaagatctctccgttaagttcaaaaatcaatgttaataatggaaagtttggtgttgcttatatccagtttggcttttaattttttgtatagatgtgtttactaatagcagccagaaatcctcttttatttcactagaaataaacaaagaataaaaataaatcacatgtttttacccaaaatgtaagcttttctagcattagttgtaaaggcagattttgtctgtttttgactacttttgatactatgagacacagttaaatttcaacctacagttcaatatttatttagttgccaaactaagcacactaatagatgtcattttaatgtatgtttcataaatggtcatttcttacataattaaagtaaattaaaccatgggaatcactttttagatggaactcattcagaatttattattataatccatgaatattagtaaatactatattcaattaattttgtaataaaatctttaatatacacttatctaaaatgacgcatacattttaaaactttaactcatttcattttgcattacatgcaaaaccattagatgtttaaaaaaatgttcaaataatatatattactatgaaatgagtgcataagtttagaaatggctggggaacgctgttctagactctttatatctgcccttgcccttaccatctttgcaccttctctaaaacaaccgtccttctcagcactgttgatcatcttttctctcccttgcatcatcagtctttccttttctactttcttcttttcctcaaatccataaacattatcaggtctctctattctacacagccagccaaccagctatacacaggttcaggaaaactccttcccagtcctgtcttcccctcaagctgccaccttacacagtcaaacttctgcaaagagtatttttctgccattttctctgtctcagggcctttgcactagctgttcttctgcctagaatgttcttctcacaattctttgtatcactggctaagtcctgccatacaggtttcagctcctgtaagagctgaccaaccatgctacagtgcccaaacaatccgtcttctgattctgagtatttattactatctgacactttccttgtcccaaaaacagagcacatccctggatgtgactccagggtgtaaaatagtgcctggcacatagaaagtgcccatgcttacttgttgaataaaggaacagacaagtaaatgatgaaccctttcagcctcccttgctggtttcttccctctctcccgacccccaaatgcttgctttgtgcaggagtctgccttttaacctcttccctccttccttttcacactctcactgggttatcacagccacccgtcaccctcagaattccaacattcacccacatggagatggcaaacacagagcacggtacagcccagcaatgcagacattgctagcagatctctgctctcttttcaggatagtctagtgtgcatggtgatccaagacaggatcttccaatcaatgggaccggcacctctaggtgaaggctatttgctttctttgacctatatgtcaatgacttcccaaatctatgtttgcagcactggaattttcagacccctttgtcaaacagccttctggacactttcatttgttcacctctaccatccagcacaatgcctggcacagggtgaatgctcagtaattctccatgctacaataagcatgtattcagtgacacgacccactcagatagtctctaccagcttgctaggtataaaagggaggctcacctatttgtgcttctcttctttcagagttgtggtggcaatttgccaggtctcgagcacagtacccatttgtaacaagttacacgttttggccaatagttccacaatttcacccttgagttccttcaaaactcttgggtggctgccatcagttccggtgatttatttacacctaggatgtcattctaggacatcctgtccatttgccacaacttgttccaaggctggagacctctctgttttcaaatacagttggggagtgggaattttcctcttcacctccatggtaacagctaatgccaaggatttgccacgactctctcaactagtttttgctcatttttaaagtggtgatgatcaagtgagtccaactgatataatggtctctctcattttttccctgccatcggtacataagaaaagaatactttctgattggcatagaaattccctgcaaagtcatcctcaaattatctcctgaagcactgtgccaactaactctataaagttccagctgataactcagatggattcaaaagctttcacacccaccagatcatttaatctgaattaagaattctgaaagattgataagagaggccagacagttaccattttacagacaaagaaactgaagtccagagtgatccagagatctgaatgccacatagcaagttagcacctgagctgaggctcaaaccgttcttcagatttacaatccagtgggttttctccttgctacaccttgattcagttgaactgcatcaacctattctaatccaatcaaatgctgaatgaatagtcattaggacaactggaaagaactaactgacgtcaaaatggttgattcagtagccacatgcatctatggcctcatgtaacaaaaatgcactctgctaagaaatattccccaaggagagcctgagagaacacactgaagagtcctgccttacagaggccagcctggactatgtttgagggtggacaacacaacacacataaatacatacatagctttgtgcatttcaaggcttaaaagttcttgttgctggattttatcttgagattaattgaattctcactataggatcctcaactggaatccaggttgagggggacatgggggccaactctagcaatgaatacatcatcaaacggggggcaactttgagtcagtagcaaccacaattcccacaagagaataatgaggaagctgagtagttggaaggattaaatactggcatttcatttttaggatcacattttgcgtgcaaccacagctccagacctgaaagactggccgtctcagatttgcccatacacatagagaaatctgcctctaatgtaatctgacatcgtccctactctctgattaaccacttttgggtgggcctcaaagaagtgcgtgccaaatgatgccctgtggatctcaggagctgccagtttcattttcccttctacctactcttttcccaagtattatcttgccagttgggaagatatgatggaatggaaagaaatatttaaccatctttgatacaaagataggagggggaaatatgatttgctatcctattttcccccattgaggagataaaaagtactttgttagatttaatttctttggtacaaagattagtctgagagtattttgaacttgtcagtcattcaactcagtattttaaattttttaaaagcataaccttgaagtatatgtgggctttttttaatagttttaaatttgaagcccctgaatattttataaaaagttcaatttgtatgtgtgtttttttaaaaggttttaatttacttcattagaagctctctgagctttaaaatatttttttttttcaatgtttctgagccttcctttggaagaataaaatgctcttctaagaaatgtcaattgatcgttggggtggaggaactgtgcagaggatgaatgtgggctaaacattctctggcacctagttgatctctcttccacatgaagcgtatttgctaacgaagggagcattggtatgggaccgaagaaaggattcccttagtctgttaatttacttggaataattcattagctgacacttttagctatgaatttagctggtaaatcccagatcaccccaatattatgtgtaaagaggatagttcagtctttttgtgagaactttgggaggatggattaaagccctttctcccatagttaccctgacataagggagcttgttaataaagagctctttggatcctttcctttgtacaggcaccgtatgaatatttatggaatatttcatctgtaaacagcattaaaatataaacagagcataccaagaaataggaaggccattttcacctaatgcatagcagtgctgtgaaaatgctagggttccattcctggttatcagctaaggaacagcaaagaaggaaaaagttatttgtttaacaaatcagggggcagcaagtcgtgtgatccagtggagctttggtattcttgttaatcaagtcttctgggtaattgaatgacgatgcatgtctatacatgcagacagacacacacacacacacacacagacacacatacaggtgcctgatatttgtaaccactgtgactggtcatatgagattgttgcttttgtagataaaaagtggtcaaatatcagagtttttgtatgacgctgcctaattagtgccaccctaagtttctggcccttctccttttgggcacagggaggggtgggaatatgaaattgctgttcacacgtgggctcctactagcaagatgagcaggaaagggaggagagggaggagttgaatgaaaccttcacagagaccaacttctgcagattccatgggcgacattgcctcttcgaagcagcaggatggaggacgtgggggtgccacccagcctgtacaccaaagacacttcccactcaccagttgtggctgtgtgctcttgattgcaaacctctggtacccatcacagatgtattatcaattttcaaagggattcgtatacaataaaatacactcaacaagaaaaccacccagaacgcaatgaatcattctttgatgattcagaaggcactttaggatcctgtagtgccttaggggcagcattacaaacatcaattatcttatggtaaatgtgtagaacagctagttcacaagttaagaaagagctgggcaactctcttttatgatatgtttttttaaaaaattatgttttatcccaggccttttctactttcaagctcttgcccagaatgttgcttctatttttgcaaaaatggctcacttaccagcttggagaagtacctctcctatggtgtgcctgagtaagtaaaactgaagttgtctcattttcctatgagccatttctgggggtagacttctgtcctgtccttctcccctaaccatttaggtatgcctctaattaaattcaaaacactatatgagaattttggtctgacaaagatgacaaatatttgtttagaaagctcagtcaggtggcacacttatgcacggttcagtttcaaatgttccttaaaaccaggagggtgtgtgattctattgaattcaggccaattgcaagctaagtttctccctctttgcaaactacagtagttggtaatgaaaaaaaaaaagtctagtccttggaaatcaagttcttgagcacttttgaaaacagactaatccaaaacatctgcaagaattttatctttaaaaacccaggtgtctaaaacataaggggaaaaatatacaaatgagactttgtcaaccaagtttttgaaaaacaggtttctagcagaaaaagaagcatctagaataaaatgcagctggctttatgaatctttattttccatggtgattcttcctttttggtcttcaacaaagaatggaatttctaggtgagtcttgtcagattttccaaaagtactattaaactaaaacgaggggattccaggcaagataacatctctgggaggctcaactctggcttgaatttattaaaaacttctggttcttaatttaaattttaatggtggtagacccaaagcagccagacacgaaggttatggtatcagatgtgaataactgaagacagatgtgctgtatttctatcaaaccagaggcctgggccttgccccatctatggtgaaaggtcaccagaattcagagaaaggaggacatattacagccaactgtgtgcctttaaagaagtgcatgaaacacacacagtacacacacacacacccacgcacacacacaccacacacacagggaataaaggagcatctccaggttgcttatacacatatttactcctactattacaaggtgagcctacacatgatctaaagaaatgtcattttacttgaagctactgtggctttgtagctacattttcttacaagttcaatatcatctaaccgctaccctaaaattatgtctgcaagggggactattggtatttcgtaaactgctgctgcttctcctctttctctgttagacatggtctaatgggtttagaaaatgacattcaagatgctgctttgccaattagaacttccgctacctgattcttgaaggacatagcacgcctaattgtgtgctcagacattttattaagttgttttgagtgctgaaagtcttttaaccttcatatagacccatattcataaacaaaaatgttttcagggaaaaaataacagggaaaaaggcatttaattacaaataaaagtactgtttccaatatgcacagatttttttttttttttttttttttttttttttaaccaacctaccaaagcaaaggcaggctgcagatggtgaaaactgagttgggaaaactgcacagatattttcccaaaacgttctcagcgatgctgcaaatgccattctgggtagccgagaggaaaagacagcaagcatcatcttgccaggggcagaacctattcccaagccactttgagagcaggagttgaacaaatatgatttagatgtttcccccgccctggaaacatggtcttgggttaaccggtccttggacaaatttaagaacagtgtctcctaccagggaaattatctcatgcaagaaaaaaagttcccttaagcatcaaattatttttccttaactttcttttagaaagtttccttttcaaagtttaggaggttacacagcatgttaaactcttgacgagatctaaggcagaggagcgaggaggttcgctgctgccagccttccaagagaacccagtcattaaggagccccaactgtcaccaatcatacggatccccatgtgggacacactttagcatgaacacaaccttgcctcggaaagcatacgtgggaaaatatgccaggggggtagctccccaattctcctgcccaaagatgtttgccatagactacgctgactggcccattcaggagcccctcgggtttccgctggacctacccttctgatttgagatcatccacgtgttttcccacctccggaggcttttattttctgcttcctcccttcttagtacagtgccaatcactgctctcccccgccgcccccctccccaaaggctctctgaggctgctccctttgtgattggcatctcattaatgaagaagggctggtgtctctcattacagttagagtgagtgagaggacctcagaactaatttacttgctctcactagggaagacacttgcctccatcaagaacttcactttcctgctgcctgtggcaataaaagaacccgttttgttttaacattaataaggtgagagaatagagaatttccaaaagaaattaagaaaggcaagagggtaggtgttggcccatggaagtttccctaaagcaggtctgatggcggagttcagtgagaggcctttgatgcggcaacatctggaccacatgaaaaaaagcctagcaggcaaatgagagactggccaagcagagaggctggggtgggaagcggggggtatgggttctaatcctaggtcctaagtccctgagtgaccttgggcgagtctttgatttttctctggtcctcaattttactatcagtaaaataaaggaatggaataaaatggtcttttagggttctctcagctcgaaaattttaatattctgtaaatggggctctggactatttaaaacttttttcatgtttggagtgagttttttttttatctctggcaacaaattagaaattcctccagaattaaagagcatggaatggaaatcatttggcttctccagctgaaaaggtcaactagattcagaaatgtactccaaggctgcactgtctgcatggaaacctaattagagatgatacttcattggctaaaagggatcaaacttatctgagctttcatctggatatgtatttttaaaaaattactctgagttactaattcatttatctttctacttacaggaaattccactcattgataaagctcggcttcgacgcccctgctcacaatgaaataccttccttgccaaccacattgctttatgatcgtgcccctttaccacattgtacttgaaatgccttgtcatttaagaaaccataaaaacgacgtctttaaaaatgggttcatcatttagctggagatggcttctgtgcctggaaccagaagcctgtcctctcggtggtatgcctccacaaaaggaagcgagctaccacaaaggacagcatcatgtgttgccttcattgctattgaatcgggaagttggtgcccagtttcaacatggatgacaaagtagtgggaatctgaaatgcctacagtagaagtaagggtgtctttatattgggaatatcctcgatcccagggcccatttctaattcccccttctctctttccctgatacaggctatttttgaacgagaaggactttggctcaaatcaacagtttggtttcttactgtttacatctatgagtcaaagtagcttgctcccaggatcccccaccaaaccgaatgaaaataaattcaatgtgtgcccactgagcctggcctgggagttcttgagatcaactcagaatcatggtctttctgtcactcccaaaacaatcctacctaattctacttgttcctaagtattgccttaggatactgacagtcttttctcctacttacagcttttgaatgaaattaaagctaatcctctctggcttggtcgggtcttgtgtaagattcccacaccccacaatcaaggccttgcaatgtggtgttagaagagatagccaagttaccacacctgtatcacgattcggataaggatagtattttttgccttccatgagacagctttgaaaacctgagtcacagaagctgcttcatgcaaatccttccactttcctcctcactgccagtacattggcacctccttcttaaaatgagaagagaagcataaacaagacctctgtggacctcagaataaaatgtaagatcttcagatttccatcgcatgatttcaccaggccaaggcagcccagcttcatttttacgtgcactgtggttctaagtatttacagtggtgtaacccgctcccccacctaaccccccaatatcggtactttactcactcagcttctagtgagaagaataaacaaaaagaatcaaagagaagaaggcaagaaaccggggaccaattttcagctcatcctttccttcttaaaagaaggaattcgcctgcagtgtctgtaatttagaaggttttaatgaatggcttctaaattatttattacgcatagaaagctgtaaacatccctctctgaaccattatgatattatctgggcaggagtcaaaaggttcaaacatttggcacttttcactggactgttgttgaaaatagttctgctctgtgaatgtaacttctctccttccttgttatatggaattgtgtgtgagcctgtgagcctgcgagcctgtgtctgtatcattcacttgagatcgtcaaaaggcatcctggctttgtaatttgctcttttgcagactttcgacttaataagagattccaaaattagtaaaaaaaaatataataaagtaaaataaagccaatttaaaaagccttcgacagaatatacaaactggatattcaagcagaagtgtttgaaatgcctcagcctcatttcaaagagcttcctgctgtcaagcccaaacacccagacaggtagactgctgtgaaatatgtaggcgatgcctgctgcctgattttcagatggcgaggaggcatttgaaagcatcaaagttccctgtatagatgtgtgtacattaatccctgcctctgtgatctctgcactcgcctattgtaacttgctgtttaatagattgccaaactttgcccttcacagactgcactttttttttttttcccaaggatctgctcctctcccaggagcttcttgctggggccgagttttaaaagttttcattcctgggcttgtgctatggcattgggtcactctttgaattctgcacttttgaacacctcacttgttggcttgcttttcctcgcccctggtgtcgatgtctgtatgtggctaaagtcagtgccctccaaccatgaagcatctgccatgagccagccctgatacgaatcattaacaaccacagcactagccctgtaagagcctgtaatgtagtgggagagaagatagagatcaaaggctgtcaactggcagcccacaggttgtgtatggcccaaagacatgtactgttttgcctacactgtgttttaaattcagattagtaactaacacagaaaagatgggaaatttcacttagaaatctgtgcttcaagcttctcttggaaaattggaaggtgtgattaaatagggcttcctgcctgcatgggtcctgttttagttgggatatatatttttttctagactgaggtggtggaacagttaccattaaggacctcagccttggctttcttgatatcttgatgttacctgctgggacattggccttttgagtctgtggtccatgataaggacacacacaaaggcaaatactaactggaaaatttgggggataccagcaggtactctaaatatgtcatctcatttgatcttctaaacacatctacaaatctgccattataatatccacttcacacatgaaaagttgaggctgtttttaagtaccttgccctatttcacacagctgacgatagaggagttgggtgtggaactagagctattagctttgaagcatccttcttttcaattagaaaggcaagaaagtccccaggaagggtgcaatatgggctgccagatctcacattgtcttctcccactgaaactcaactctgctctagtctaaccacaccacacttctcactgtacccgaggtattcttggtcatttgatcacttcttgtgtttgtgtattctattccctgtcctcaccttctcttttgtacctgcaaactcccttcttgctttgcaaaaccaagaataattgttagttcctttatgaagattttcatgacccctgggtcagtttgtctaacactggggctcctagagcctccatttctactcaggtgtctcgtggtaaaaggtccgtacactggtggcttttcactggactgtcagttccttaagggcagggccacatctcgttcatcactctacaccaccatgcccagcacagatgcctgatatgcaggaagtactactccatgcagggtggcctatgggtggagttttcctggctgaatcacacacttatcaagggctccttgggggaagtgaaattgaattggaagggtcaacagtaaattctatctgtgttttcatttgttttctcatcccccatcatgacaccctcgcttatcctccaaactttttgcttaacaagactttgccgctgcctcctcttttgccagatggcaatgcactcactacttccaatacccagatacatccatcaagcaacttcaaatttgaaacacatcagaaacttgctgggcatggaacaggtaatgaggaaatggcatatgtgcactgtgggatcgtgatggggctgtaaagttaatcaagaaagaaacaattccaccaagagcttgtgaacgtacctgaaaggatgggcaggtttgtccaggtgtgagccgtaggctggctgaatgtctctttctcatgtgggttatgggaaaccaatatgcctccaaatcactggctggacctcaactgaactttcagtttttattttccactcccatactatttttgaaagcgttaaataattgcctctacagctaagcactaaaggcctcatttaacaaaaatcaatatggagcagtacaagcatggaataaaccaaaccagaggccaaagcttaaaatccatctcacaactgaatcataagtggtaaaattaagagcaggtgcactgacagacagaggtgaaggctggcctgataaaatggatttttgttatttctaatgaactcatcacatgcagacaatgagaaaggactgaccaggtgggagggaggagctgactttggcaatgatgtgtcttctccacacaatgattatttcaagaaaggatgcagagtagaggctgtagtacatttaggggagtttcaatcggcattatttcatttctcctccctaacaaatcttcactgaatgtgtactgcatgtgtggttatttttaaaacgtgcacagtgaacacagcttgtgaaacttcggtcaacatcctaatcaggcaactaatgccctattcaagattggtgtacgctagcgaccacattttagaacgattttacctggtgtgaacagagagtaaagaagggccacccctttcccttaataacaggttcttagctgttagtcccaggaagtaaagcaaaggcaaatgaacttccatgataaatatttaagaaaaataatctttaattgagttagaatgaaagtaaatgtgcaaactgctatttgagataactgtctcgataagcctcttgcaaatataatatgaagcagaaaacctgttaactctttttgtctcgtctttattcaccagggttaggtgctcttacatggtagggggaatctggactagtaatatctcgatgaagttgcaaaaagaacaacaaaaaaaacccatttggttgagcactgtgagctgacatatgcacctgtaagccaagataactacagagctgctctgcaaatttggttagggtttaggggataatcttagactaataaaataaaccatccttgaatgttctagtcaccaggtagcagaagcctgcttaggtctcagtggattccttctttctggtctcattggcagttagatattgatgttataaactctcatgccacgagtgtgcctctctgatgtctgatatccatttggaatcacctcggaaaactcactattaccagcagtttcttcaagcagaccaccctctatgctcctgaatgttctctgaccaggctgggcctttcttttcctctaataattagccacccattgtccccctccaatttcttccaaccctgtttcctaccccttgcatttttcttgcttctttcattttccctgtgtatgctgactgcctagttcctcttctactaaattatgctctattatttccactgcctgaagaactcacagctgaagcattatttctaaccttattttgtattcctagcatgtgctataacctgttttgagttttatttgcagccaagatgctgacacagctccaattttgttttcatattttgattgggtaggagtgttcattactgtgggtactagggtagggaagaaaagtcattttaaaaaggcacaatttacaccttcgttaaagggctttttgtttctgaatgctgcccatttaaattctaaaaactacaaatgttcaaaaaagatattcctttttttttcttggagaaaagagattttaatgaaaattatagaagtccaatgtaattttcctattatgtttttaatgttgtgcctattatgtctgatctccttttgtgtttcttaactgaccagcacatacaggcaggtgtggaaagcctagaagtcaggggtttgtaagaaattatgttttcaaagcccagttcagctctacattaaccagccttcccagggacaactgcctcatttgtgacattattgaattcatggttcatattaagcttatatctcataaccaggtaattcatgagtttcagctacagggaaccccttagatggggcataaaatttccaatgagctttcccataaaggaaagtgtaggatgagtgaggtttcgtgctcctttacgtttgtttgttttttagagacccagtctcattttgttgcccaggctggagctcagtggctactcacaggcccaatcatagtgcactgcagcctcaaactcctgggcacaagagatcctcctgcctcagcctcctgagtagctgagactacgtgaatgcttcaccatgcctggctagttttcacggctcttgatgtatgattctcaggctcctttttggaagagatttaatttcatgggactcctctactccaaaatcttcaagaactccacagttaaggttgtcaggtaaaatgctagatacccaggtacatttgaatttcagataagcaccaaataatatttttgtataagtatgtcacatgcaatatttgggacataattatatcaaaaattattctttgtttatctgaaactcaaacctctctgggcatgttgtatttttatttgctaaatctggcaaccctatccatagcgcataagggaacaagctttaactcttaaggtaggacttctgggtcccccatagactgactctcttttctttctgccttattttctgctatatccaactccccctaccctccattccactgagtttgagttactttcccatctggaatgcctcctttccttctctcgccctggattattcaagactgcctcctcagggaagccttccctgaacactcagccaaaagtaatctcttggtctttttagaccagtgagctcgttctgtgtggcccattcattggtacatctcacacacttgcctgggagcttagctatcatttcatctctatactgtattctttccaagaggacacaagctcttgggtagcagtgaccttgccttatgtttctttgtgcactttgcagtgtccagcactaggcctttcatatagttggtgctcaagggatacctagtgatagaaaaggccactattgattgtcaccgagctgctctcttttgcagcttcatgtttctcacacttctttccctgcattgagggaaggctcaacctgttctccagaatgttagcacgaaccccatacatgaacttcatcatatacctcattaaaaacttgatagccaggttcatttcccatggacaagtgaataataagtaatacaaaacacagtcttatgtgggcaagccacttgttctctctgtagatcagttgtctcatctgggagaagggcctggttcctcccctacctctcaggatcatgaggatacacgagatcttggaaaaacataggtagcacggtgctgcagtgcatttagtgatgaggccaagaacatggaataaacttctctaagtatattctgtttaaactggatccttgagttgctcatgagaatttcagggtacatgccagcaacaaattttcaaatcatggctgacaaggtgggatttttattttattatttatttttatttttatttatttatattatactttaagttctaggatacaagtgcataacgtgcaggtttgacacataggtatacatgtgccatgttggtttgctgtacccatcaactcgtcatttacattagatatttctcctaacgctatccctcccccaggcccccacccccctgacaggccgcggtgtgtgatgttccccgctttgtgtccaagtgttctcattgttcagttcaaggtgggatttttaaaatgacacaattggagacaaaagtagctggcaagcaggtggcaggattctcttgctaacctagggtactaagtcttggtcactggaaatttatatttaaaaactacctcgtgattgcctggattttagaaatatgcaaaaaataaatttctagggaaaaataccacagagtaataatgtcagctttaactttctttaaaagctgttttaaatgtttctctttaaaaaactattttgcttttcctcgtatgggtacccacacctaccttgtgtgagtcatcatctcatgcaccagggctttcaaaacgtgataagtaaagcaagacgtctactgtatatcttgttaggaacttgctttgcctttttgctcctgttgctctacagaaaagatggagcgttcatgaatggcaaggtgagccacacgtagggggccgtcctagcccagactgcccaacactcctgcaaaacctcatttcactgctggatctacaggcaacccctgcactgcgattcctcctcctcacacccacattccaggctcaattagtggaatcctagtcttatatccacaccatggcagcacattaaaatgtctccgattaagccctggattagcatgtgcccagactttatcttaattgccgattaagattaatcccgccagggagttttccagggctgctttattaccatggggtgaatcattacatagtttgagttgcaagttccatttagctttctttgactaaaatgggagacccagactctcttggcctctaaggaaggggctctttattgctttctgaaaacctcccttgacagctcatttgcacctgaaggttgtgaggatgaagccttgatccatcttgacaagtctatgaaaactggaacacagggagtcacaggctttccggcgggctcttggctttaaaaatctacagtgaactttgacttgaagaatgatctttatatactcggtgctggctttatcattcatagtgatttactgaaaaccttttttttctctctttctcttgctctacatggatgtacatatttgttttctgaaccgtttgaggatatagtatatacatggtcctttagctctacatacttcagtgtgtgtttcccgagaatgggaataatttcttacgcaatcacagctgagttatgaacttcaaaaatttacattggtactttttaccaatcctgattttaccaatacttttactaatattgatttactccaaaatctacttcactaagtgataccccgataactattaagtctggctacaaaagagagaattgaaagcaagagaactctccatgttagaggtaaagtgatgagacctagaaaagagaaataacttagtgaaggtcacacagtggcagaagagtccagacaaactcaagaactcaggggcaacttctagccactgaattgatacgcacataaagactcaagaaaggtcaggtcagtatcgactctggaaacatccagagctaccgggccaagcagacttgacactaccctacctagatatggaaatttcccaagggcagaggccaagaactctgtttttgaaaaggtgtgcttcacatttatgtaatacataagaaagacttgaggatagctatacctgtttcactgaaatacttcttttctcccagctttaagatgctaattgttcatgcaattctgtttggctgtctggggaggcataagtcaggagcattcagcagcagtgtagagatcactaacgtggcacagctgtgagaccctttgacaacagtacgtgcctttggcctgactcagactggaggacctggcggacacccacagccacggcttctggggattcctaaaagggcagttccctgctttctacctcagggaacctgatcatgttatcgctctgaatgggttggcttttgtcagagcatctgggtcaggtgagtctgcgtagtacttttcaatgtcaaggccagtcatgatattcatcgtcaaatctgtggcgccattctgtgatgtctccatctcagaatctgtcctaatccaagagccaacaatggaaatggcttcatcctgagaggccatcaacagagacttcagaaggatcacagaggcccaatctccttcacagatcctccaccagacatcccttcctaaggactcttcctcacatggctgtgggtattcccgcttctgctagtagagtgtatgccaagaaaagagaaagcccgtctctggtttccctaccctgcttactgccctgggcggctaccagtcttagtggtatttgggagtcctaacggatgcacccatatctaggtaacacaaatacccacagtctttatcttcctttacactaaactcatgagatacaccacattggccactggtatttctgaatggacagaagtcatttgctggtctctttctaaaggctgtagtctgccacttccatggtaatttcatcctaaagcagagcctaagaattgaggacgaaagctttctcttttgttgaacccacagcataaccatgttccttagattctattacaaaacaaccattggctttaactggaaacttgaaaatttagggtaattatagtatcaattcatgattactcaacacatttcctcaacttcctttgtgactgatattttgagtatgttactgtaacattcgttgaagaaagtgtgttgtcctgaaacaagtgaggcctgagacaccccacacgtctaagatttcttacctatgattcatgtggctgccagaatatcttttaccttctttcttctttcaacccttctctcttaagttccgtaaacttgtgtcgggcttcctgaatttgccttcagcactagtagtaacgtgactctaaatggatgggttttccatgttattctggtccaagctgcaaaagattagattccccaccgagccctgatggtggtattactaggctttaacttgatgggactgacttcgttaatagaattctctcttcagttgtttgactatgttaatgttgctagaaggaaaaaaacccctgattttcctatatgtaagctgttttcaaatttgcgtgggggttctcttgaacagatctgcagttttcttcctatggagacactacaattaacacgttcctttttctctttataaaaactaatatcttgctaggcactccgccaggagtactgaaatttagttctgataaaaatccttcttggatatttctggtctaagctttaagatctcttttccttctttccctctttgctcttttcccctccctgattaccccctactcaaggcacgagcacacacacgcacaattcatttatgcctaccttggaacagatctgagccaacatattccctggggggaaacaacggtctcttttcctattaatgaacagtatggtgttgcagattcacggagggcttaatttaataaacatggaaagatgaatatgcttatgggacatcaaacctctttaggtttaaaattactgacatagaagaattgtcttgtgaagcaccccgtcctttcatggctgggtcattatggaatacaatgcggcaggggaaaaacatctcctacctggggcttcgactccttctaccctttgactccatctcctccatccctaagtgccagaggaggcgtcagatgtgcagaagtcagcaataactgtgtgtgaactagttcaacctccaattctgtggcttagtccttatcggtaattcgatgggaacctgaaactttgttgaagggaaggtattttgctggctcggctagaattgagtgtagacagcacccacgatattgtgatgaccaaccagcttgagatgaaggcactcatgaccagcttgcaggagcaggcctcgtcccaactcctactccctttctctccccgccactcttattagacacacttcagactgaatcttctgtggttcccacctcactcttcccattcttgagccccttccccttcatcttggactagtttgtcagatggctaggtaatctggcaaggtcttcaggagaggagggaaataaaacaggcggaactctgtccaggcatttaaagacgcaaaaggctgcctgctggggagcaaaggcctgggaggctagtgagcacctacagagagctgggtgctggggagaaagaaaggaaggagcatcagagacttcacaaccaggctttctttaagtacacgtgctcttctgctccttttaaattatgcaaaccaaactgagataggcacagcagagcgtagatcctgcactaaaagggtaagaagcttgcaattgagccgtggctgtaaaaggtaaagacaaggtatggggtccccagggtttggggtccaggtctggttaggggagtggagttcttgtaaagagtccttaaatctttctctaaaccaaggactgtctagacatggcatcagtaacagtgcaattaccgtctttggatttatgcagtcctatccttaccattctgtttaaacctgcaacctgcctccctttttccttgccctatttttcctccttcccttagcacttatcaccttgtaccactatacaatttatttatttcttgtatttactgctaattgtctgtcttctctctgcagaaatatatgctcctccaagacatgagtatttgtctgtttatcttcattgatatatctctagtacctggagtagtgcctagttaataataggtgctgaataaatatttactaaataaatgaatgaatgttattactccttacaagctgtcccatactctaaaacaccaggagccctttaagacgagcaaaaacagagccaaaataactatgcagaaacaaagcataagaatgttcacactttagtcttctctaacaaagtatattccaattagttaagtgaaaagctgaatacaaaacaaaataagacccggaacattagctcaggaagaaacacggatacggagaaatcacaacgagcagcctcatggtatcatggaaaattgatagcctagatatcacgagaccctggttacagtcccagctttgcataaatctgtgtgaccttaggcaaatcaccttgcctctctgggcctcagtttttccagttaagtttgattcaactcaaatatttaatgtgtgctcatttcatcacttctatctctaaaatggcataatcttacctagtcccacctgatattaagatgctaaaatagcctactacctaaatgtgatcatttctgcgagagaaattaagattgcatgcccagccccctatcactgtgggctgcagtccccagatggattacaccttcattttaacatccttattcagcacggtaggcatttactctaagaggtgaagtcgaaagagtcccctcatgcagcagagtccaggtgctcacctctagtaaccactttggagaaccgagaatcaaaccgcaatctcggcagcacagggaatgagtaaaatacccatagtcgaggagcgtattgaactgctgagcaaggggtgtgcaaatactatttcaaatggcttaaaaagcatcacagcaatgtaagtgggttacggttgcctcacaaaagcacatctggaggatctctttgctctcttgcatccttgaatatcgaacccagaaaaataaattgacgtgctgtttaatccaatagtcaatatgagcttctagtgtatagactcaattgacttaaaactcaagctatagcctccggcaagaaaaatgtaacacaactgcgcaggcttggtattgatacatatcacaggtagctgtttcttcagcaagaaacaattatccaatgctcagtgctgagggatcaatgtgcttcataatttctgatgtggcttactgaacagctgggctcaggtttttgtttttgtttgtttgtttgtttgtttgttttttaatctttacgggtctgatggctctctaaagggattaggttattgtgattttttttttcccatgcaaaaggacctgcctttctttccctgttctaacgaaagggcaccccccactgagttccaaagagccgttgccccttaaagtgccctctgccatgcattaccttaggttatgtggcaaacctaaccccatactacagcccagttacctcggtgcagacaactggctgtatttgattgttttgctgttgacaacaggatggattagcagggctagaaattaaagtatattgagtattctttaatgccttatgtacaaatttttctggctgtcagattctctgtttggctttctcggggccttgaaggtagggggtcaggaactaagtgttttgagaactgacagctccctttagcgaaaaacagaattctcccacccttaccccttcccagttcaaagaactgcttcctgcttctttgcatggaagatagttactgtttttctctttcccttttgagtcaggatccctggagagccttataagagcacagtgtctactggttaaagggtaaccattttcagggaatttgcattaatctgattacattttatcttccttcagggtgagggagtgggacggactgtgaggtttcctttgagtttcaggtttagacacaccccagaactcaaagtaaaaatgatataggcttaataataacttcccaagaagccttttcaagttcaaagtggattgtaaacattaattaatcaattcctcctcccaacactgtgtgaggtatgaattactcccattttatagacgagaatgtttaggtagcgagcataaataactcgtttcaagcctaaattggacttctagtcagtaaggcacaagcaatttggattgctgtgcaaagtgaaggctcatcagacttttctcattcacaaaaattaatgaaaacccgtcctaggaacccaaggctcgttgtctccctggagtgatccgagtggcctctcccaggttggcccaactcttatctttttgcatcctcagttttctggccagaaagaattgccttcctccaacacaaccacaaggagttcagatcaaaggctcaccaatggtccatttaaatgcccagggcagtctaatgcatctctccataagactccctgaatggaggcttgggttttaccggcccagccctgccatcgaagtcatttgcaatccaggctgctcactgcacctgctgctgtggaagatgtaataggagcaggaagcaccatagaaggggaaatgctgtttggcacaagtaagtaaacagataggttaacaggccaacacatcttgcagcctttcactatatgaacctgttggctaatgttagtaatccacacttcttctacaaaagtcaagctggtggtcactttgcaggaaactctacaaggtttttctcaagacagtcctagcaatgaagcttccaacaaacttaacatggttctacatttccccaggaattgctgtaaactgataagcactgatattctttccattgactaaaacatcatgatcagtcaactgaggcctgggaggaatgatctttgtggctcatatgcaccaaggaggtttgcctcaactcgaagggtggagacactcagatttcagccttccctcatcagaaacacatttcctcatttggatatgtgttttccaaagcacttgggggttttcagcaaatctttatacatctcatggaagtaagaagaaaaaatactcatacttcacagaatacatgtgacatgtgtctgttaggtggggagagggtggggaggaggagttttagctgagctgtaatgaatatgagaaattaaagataaatagagggagagaattttctttcttttttgccacgctgggagtggaaaagtttggcctagtggatctctaccctggctgcttatcaaaaccatctggagaacttttggagactcttatgtccaattcagttctactgcatttgcttctctggaactagggcctatgcgggagtattttttaaaaaagttccacatggactggtgatgtgcagacaggcctgggaaccactgggctggtctagagagcccagtgtagacagtgaacatccgcatgtaagatacatgacctgtcagagaacattcaagagggaagttcctttaaaaagaatcaggcgagcttctcctcgcctaatagcttccaactagcatcagtgttcaattaataatgtagttttatttgatgtttcatgtgagaaactatttaaaaacaagaactctttcattctttttttcatttaaatggactcaaaagaaacaatttgcttgatagatgagcacaatgagggattctatgaccgtaaaataactgaaaatgaaaaatgattaaaacaacaaaacaaaaaccacacttctccatctgcaatccacatccgtgtagccatgtagtcgtaaaatttattgagggtctattgtgtttcaggaactatgcatgaatctagcagtgccagggtgaggcagacacggtccctacatgctagtgtcacccattctagcaagggaagggacaaccaaagagaaaaagcactctgataaaagctgatttttacttgcctcttaccaggggtcatgcaatcttccaagtgctttttgttccatatctcattttgtcttcacagtaactttagtaggtggattctattattatccccatttcacagatggggaactaagacttagaggacttcagtaacttcttgaaggtaacaaaacctgtaaaaaggagagctgcatcttttggactcagtagatcaaacatatacatccgcctccttctgcttcttaagtgcatagaaggtatgctgaggctggctggtcgtgctagggtggagtggggacgactgagcctatccttgtctcttgttaagtcactgctgctccaggtgagaacaaactcatctctggtgcccgcagctttcagggttggtgttgaggaatccccttccccttgaacttgcatgctttatggttagcagtgcctttgaggccacacacataagcgaggaaggaaaacataaccagcccagagtcctcgtgctggggcttaatttggtacctgagagtcattcattccagttcccggggcaggactctgcctggcctgcttaccagtgtttcagcagcacggaggggacccagccagcccacagagttaagcgcagctgatctgtaactccaagtcatctatttatcccctaaccgtgctgctccacgggcaagtgcagggacggagaacgcacgctttgccacagttcagtgagccgagtgcaagctcccttaacttggctgtggtgtcaagtcacagttatataacccctgggctgagtgcctccctggggtggggggtagggggcgggcaacgggggagcaggaaaggcattattagtataatgttaagaaaacagactctgacatcctccagagtttgagagtctggaactgtttgtttcccatttagtttgtttcccactttgttctacaatcttcaaatcccagattttggagtctgggcagctgtgggtggggagcccagcagcgtgaactggactcagcccctttcaggcagtgggcttatttagctttaagaaatgtcccaggccgggtacggcggttcacgcctgtaatcccagcactctgggaggccgacgagggcggatcacgaggtcaagagatagagaccatcctggccaaaatggtgaaaccccgtctctactaaaaatacagaaattagtcaggcgtggtggcaggcacctgtagtcccagctacttgggaggctgaggcagaagaattgcttgaacctgggaggcggaggttgcagtgagctgagatcgcgccactgcactccagactggcgacagagtgagactccaactcagcaaaaaaagaaaaaaaaagaaatgcccgttgcacgactgttttcagaagaccaatgattaagagcacgtgaaaattaatgcacaaatacagctaaggaagtgtaccatatagcttttgcaaccactcttttgctttgaaagtgttaaagtacacaactggaaagatggaaagacctgagattgacggcattgtagatacttctggaaacttttcaataaggacagcagaataaacaaatatgttctcctttcacgatctttattttggtaagtccgtttctcttggccacaagaattacaaccatcttttcatttttttaactgcaaaggcggtcatatgatatgaagtcactccatatcacagaaatcagttgaagttttattcatggagactcttccacagctgccatctgcccctccctctatgagaagcaaagtttcccgaagacaacccctctctcaaatgtggccctaaaacatttttaatgagtagtaagagataagtgaacatgtgggaaaatgttcatccctgctagtaataaaaaatgcaaattaaagcaactttgaaaaggtaacatttcagttttcggaaataataccctaatgctggccaagctgcatggaaactgatagactcaaatgctataggcattgagttaaaccagcataattcttcttgaaagaaatatggcaattggtaaccaaaattataaagatgtgcatatcccgacccagcagccttctctgggactatacgctaaggaaataatctgacagaagcaaaatactacacaaattgtactactgcctttaatgatcaaatctaatcacagacatacacacaaaattccagaaggagcctaatgttcaataatgggggatggcttagcaaattctggtatattgataatggaatagtaaaaaaaagaaatcaaactgcaaatacaaagggggtgcatgtaagatctaatgtcactggaatcagaggatttacttgaatgtttttatcttttttttaatataccaaagaaataaaggcttttgtacagactgtactaggaggcccttaaaacagctgttttcttgtccacctcatctctgcaaaggggtgtttatttcttttctatttaaaaattaattaaattttattgacaaaaattatatgtatttattgtgtgctacacaatgttttgcaatatgtaaacattatgaaatggctaaattgagctaattcacatatgcattacctcccaaacagtattttttgtggtgagaacacttaaaacacaaaggggcttttattaaggattttgaaaatgaaaataatgaaatacagagggtcaccaagatcacgctggatacaggaagaaggcttaaaacgtcgcatccttgagtctctggtctaagtcaggtccttggcctttgagtctcacctttgcagaggacctcttccattttcccacatgggatgactttgaaaggtgctaaaatggggccccactctcctcatactagccacatgagctcacatccattcaggtcctggaagtacctccagtaagggcctgagaaaactttaaatgccagggtttcagaacctttcagatcaacaacctgtctgttagccaccctgaaatgaaggaaacccagatccatgtggctaatcatcttttcaagactggcaaagaagagaatttgtacgcatgataataaaccattcccacaattagtttaacacaatgatttctggtcaaacctaggggagccatccctcctttacatcaacggcttccacatgctggtcagtaaacagtatgggcaggcccatgctttggttctcactggtctgtatctaactggggaaaataaggataacataataagtttccacgaagctaaatatattcaaaggagagaattattccttactctaagataatgtcctttctattttttcagtccccaaagtccactttttaggggaaagatgacaaaaaatagatggagttattttgttgttgttgttgttcatgttattcctttgcagtaaaatatagggaccctgtattggcctccccaaatgttactgaaatcatactgcttcattaagcacattaaccttggatcttccattcaatgggggagatggagattctggacattccaattgggtcactccaaactgtgtggcaaaaagttctggtcctgctggcatttcaaactgtgctgcacaaccattatagagctttgattccatcactgtgtctgtctgtctaccctacctggctgtgagcatctttgcccaggaaccactgcctgattcacccttctgtttctggtgactagcccagcactgagtgtactgttgttagactgaatccatagttggatgtacaatatgggtgaaatgcaaagaacagctgtaaaattgaagagaaagctttcagtgttggttcagaagacctaattagcatcctggttctgctatttaacagctgtatgacttgagcagtgactctctctcatactaatttcttttctttaaagtagaaaaccaacctaacctctataaagtagaaatgtcgcctatgcccttcaccagtatcctagctgtgtccttgtgtgaagggtcatgtgaaagtgcctatacatacatgttaatttcattcatttctctccattttattccctgaccagatgcttctcatatttagatgtcacccctgtcccagccctggcgagaggaaattacaaagcaaaaagccagatcccccaacccaaggatgtggaagtccagaggcagctgtcagcatgcttcaattaaagacaaaatcaaatacaagcagcatccgtttgcatttactcacgattattgtgtttgacaagataacctgtacccacttgtacattcattacagagcttctgaaatgatttttctttgtctgtgaacataggaatttttaatgaacagtttcagtgtctggtttcatgcactcgaaaagtaaacatcagtgagcatctttctaacaggcttgatccatgccctcagatggtctaccaggaggcagacttgtgtgggtttgaaactttcttcctgaggtcactgatggaaacaaagaaggagaaactttcagcatcccctttccagtgataaacattttaaataaatgaataggtaaacagagaagggatctcaattttaattgctagtaagtgaggcataaaaaggaaaagagagagttgtaactgccaggacaatctcatgcattcttttgaacagattcatctacaaatgaatgtggcacaaggaaatgtcaggtgttctgcaagcagtagctcaggaagctcaagtcaggtctctcgtctgtccctccagctagctacatctcacatcatgcttcctcacgtttcagggctgcagcctcggtagccttcacccagttcctcaaatacataatccttcctctatccacaggacctttgcatatcacactccctttgtctggttcagtcctattcatgtttccgatcatcgcttcctcggggaagcattcctcccctccatattgaggctaaagtatttccaggggacaaatccttcattgcgtttgtcactgttgttgttttacattgatttggtggcaatctgacaagctctgtctcctgcagaagactgtatgctccgcacaacagggcctgtgtctctgttctccatctcatctctggcacctcacaaggttggtactcagtataactatttgttaggcactaaatgaatggaatgaatggatccctgacaaataacttcaccaaaatcttttattaaagacttgcctttgcaaggaaccctgtggaatacgccaaaagacatggttccaggcctctgggggcttcatcagctgtagatgtcatgtttatacatacacgacatcactacggttgagagttgggctgtatcagtgtacaggagtgctctggataggatgttctaccttggacaagccactaaatacatctgtccctccatttccccattgatcaaatggtgacaatatcagtgtgctccttgttgaaaggtcaggggataaaacaagataacagaaacaaaaatgcctcaaaaagataaatattactaataccttttacctaaaagtatccacctccttaaccaactctacaaagagtcttgagcctcgctagagaaacacgatggaagctactctctttgtgagatgcaccttgcacagcaggagtgggctgggccaagttgggggcacagtccaggcaggtgggaagacagagatggggctactctagagagctaaaggacaccaaccttctgccaccagggccagccagggttgacagtggatcacgtggcctccctgaaatagggctactgagcagcttcgtgatgcacagagacccaggggaaaggagcaaagggccagatcctgctgcaaaacacactgcccatctgccctgaggtctgtcattcctccagtggtccttgggccctgtcttgcctgggactggcaaacaaacaggaggcctcctccctccctgatgctcacccgactggatccacacctcactcagcaacagctgtgcgagtgcaggtaaagtctttctggagtctcagctcgtgataggcatttagcaaccttcccagcggaggtgtggagcagacgaatgatcacagagtgagaaccatggcttttctcagggtcagtgtctcaggaaccatggggtggtgtgtgagtggaatcttgtcagtgttttgtgaagatacctaagactttcagtctatagctctgagaatgtcatcccattttacaaatgagaaacagagaggttaataagcaaatctacagcaagtcatttaatgctgcaaaggtgtagtccatggaaagagatctaacaggaaaactcaagagaaatgctggggagcgccatggggccaacagaacagaaggccctgttactgctcaagcagctgccaccaagcctgcgagctcaaggatgctgggctggctgagggacagatgtggcaggcatgcacgcgattcaacaatgcaacagtccctttcttgtttgtttggaaaggttgtacccgcctcgaatgctagcagcaatcacgaaggagccactaactgtggcatttcttcacaacatttcccctgcaactgcggtcaaggtggagggatggccacaaccagtcatcttttctgagtgttcctctgcaaggggtggagtggggacagcatacgttagtgggctaagaatttgcttatctaacagaaatacagcttaactaaccaagggatacatacaattgttcttacaaattctgcaacccatactgagcacttataaaggccaggccctgtgagagatactgaaaatgcaaagctgaataaggcaccttgactgctttcaaggagatctttcctaattggctaggagaggatataacccaaaatttacagctgccttttggcaagcctatcactgcaatctacaaggtgctatgagaacttcagggaaggagaaactctgtgggaagagcctaggaaaccttccccaaacaaggcattgaggaaagagtggaagttcatcaggcatcagaaaaaccattcattcatgtattaacattcaacaaatacttaagaagtattgattgtgctgggcacccttgtggctgctggggatactgcagtgggtgaaacagcccagttcctaccctcatggagctaagtctggtggcagtgataggcacacaaatagtgaatcacaaacttggagaggtctatgaaggagaagtacaaggtgtctgaaaagtatctatctggggagctgatcatgtctgagaggcagaagaagcttcggtggggatgtgacatttgagccgagacaggaaggatgctgaaagcaggggtaggctgaaatttccgggctgagtgagcatcatgtgcattcatccactccactgacatttatgaagaacatgttgttgcaccagggtccctgatgatgcacaagacacatctctgacctcaaggagcacacagtcgagtggggagacagatgattgcaatagaatgtgctaagttcatggctggtggggtggggaatgctttcccattagagggaacagtgtgtgcaaaggccaggaacgcacagctcaagacattttagtgggaagttaagggttccaaactcccctcgattgactgctatgtgacgtgtgcttgacctatcatctttctttttcttgcttaagaacgaaactcctttctctactaatcacggtgttgctgcaccaagaagaagccgcctcagcaaatgctgacgcatgcattttgcagtgagctggaagtgcctggcctagcttggcctgtgcctccctcctttcctccccaggcaggatccacacagtcatcagcaccacggggctgattgcttaaagaaggcaccctccctgcctcattgctccaagctggcctcagcccaggtacctcagccacacccacggcccatccaaacctgctgtctgagggtcagagcccccttccatgagaaagcccctgtcccgcttaataacattttctctctgcctgtctaattaactccgtcactgtatctgcagtcagataaaatgctcatttcacaccacattaatttttatcagctgaacattaagcaacacaaagctatctatgcttggtttaatttacatactgacagacctacaaagcgttacccacagtggctgcgaagcaaataagcagaactggcatcaaacaaggctcttcaaaatgaaatattgatttgcaaggctgacagtaaagaagggttggagggctatgggagaagaagcaaggaatagaagagtgatttttccttgaagaacaattattgatgttgtcaccagtaggcctcccaaaggccaaacagaggagccagctgaggccaggatcccaaggatcaggtgttcccaaggaacacagccccacagtccatactgctccctggaaaaggactctcttcatcctggcatcagaggccatcccagcccgaaggaaaatgccctcaaacagcaaagtattttaatcacatacacaaacacttaatatatcttgcttctgtaactttgctcaagctgtttctctagaagagtcttccttctattccatggccaaactcaagcaccacctcttccaggaagacttccctggacaccctgcttccttacaaatgtgttgccagaattcccagcactgggtctgcattgcaccgactatccataccgtttcttgataatctatatgtatgtttctttatcccacttgttgtgagctctttcagggacagatctaggtttggggcagctgaagtttaagcaagttaggggattttctttaagaagaaagaattgtaaaatatctaacttttgcaaatattacagaaacctataaccatgaaaataaattactaggggcattctcagggctttaggagaggccggtgcaaatgaagggtcctgaagtttaagttttatcagctttgaagtgggtctacttctggtctcttgagtgcaattccttgcttgtaacaagcattcaataaatataggcagcatgaattaaatgaataaagaaaaaggaactactttggggtgcccagtctgtgataggcacagccaaataactttgggaaggatattctcctctaagcagcacagcagcctatagatgatacaaccgataagtgttgaagccagaattgatttccaagactcaccttcctccatctgagaacctatgacccaagagaaaaagaagcaataccccaagtgaaaagacaagtggctcacacaggttaagtctttagactttagaggtcttagcactcataatttcacccagaccagtggttcttccacttttgtgagcatctaaatcacctgactcacttattccatggcagattctctgacctgcaaaccagagagtcgaatttctcatgtctgtataattggagtggagcctgagaatttgtattttaaatgtgtccactcacaatcttggtgcaggttttcgaagactacactttgagaaaccttaactcaactacaaatgttgatgttgaagggaagtgcaccaggagaattaattgggtgagcgctgatggagaggctagtggaaagctgtatttccttcaagaagctgggatgtgactttaacatggtgtggcaccatggcctcaggaagactggggactgacagagaatggaaactgcaagtctagaacctgatgagtaagaaggctgtatacatattttaaagtgcctaggcaagccaccagtttgagaacattcctcgtctttgtgtgactttcaacctgcagatgttttcaactgagtcccccatgaaggagaggagctgaagaccttctcctaccacaggggccaatgctggctgagtattctgctttgctatgttaagaatttcaagaggtagctcctggatatgtaatgcacagcgctcttgtcctggttatatatggcttctcatgaagaaaacttctggcctagcttcaatttcacaattatgcatgctggggcttgtaggtaccagatggttccagggttaccacaggtattttcctttcaacaccatcatggtaacgtttttctcttcagaaatgtctatgaccttcagaggccctagaaacgcccccccattgcccccccaaaaagcttcaaaatccaggactgtctattgtttcattgtcttttgcttgtttggtggtgtttattgggaagaaaatgcaatagatgctttggtatcaaaaagtctggctcttttagaatcaaacgtacataaaactgattgtagaacgagcccaggctgatgtcatgggctctgagttcaggcctgattcagttactacttgggcaagtcacttaacttccctaggtcatctcatctgtgatatagacttgataatattagttctgcctcccagagctgtgttaacggagacaaagtgttttgaaatatctaaatataaatgtaagggctattggcttttggtcataatctactaaccccttacagataacagttaagttatctacacacaataatttttaaaaaccattttcaaggcaatggaatgcagtcaaaagtccaacaggaactggaagggagtctgtcccctgaaacatgaaccttcaccaagtaaaatttatgaatttgtggggttttgtctgggagcactcccaagttagctttcagctctggatagcttgaactgtcagagaaataagtcagaaaaggaacaagaacataaggggagaaattctggaaaggtgggaactgcagaggcagcaagctgcaaaatctatgtacaaaatctgcccaatcctcggctggctgcaaaaatatatgtgcatgagggagactccaagggacccaatacgaagaagcagctggaagctaaaagaacagaaaagtgactttatctgctgtcgaccgcaggaacaacagagctggaatttgagtccaggcaagtcgagtggttgctaaagcaaaaattattttcagagaaacaaacagaatctagggtctctgcaacaatcatttgttttgtctattacccaatccaaagtctccatacatgcaaataaagagtaaaatgtaacacataagaaaaaaaaaagcagtaataaaaaccaaccccaagaatactcagataatgcccttagctgataagtactttaaagaagccattataaatatgttcaacaaattgaaggaaatatatacataataaatgaacagatatgggacttcagtgagaaacagaaactataaaaatgaaccagatagaaatcctagagttgaaaagtagaatgaatataatgaaaaaaaatactactgtatgggcttaacagcagactggagatggcaggaaagagtcaatggacttgaagatgaattaatagaaagtattcaatcttaagaacaaagagaaaataatgaagaagagtgaacagagcctcagtgacttgagcattataaaccatcaaacagtatacatatatgaaatagcaagttccagaagaacagtagagagagaatgaagcagaaaaagtatatttgaaggaacggctgaaaatttaacaagtatggttaaagacatcaacttatagattcaagaaactccgcacatcctaagcaagacaaatacaaagaaaacaatatctagacaaaccacagtcaattttctgaagtcgaaagataaagagaacatcaaaaaagcagccagagacctacagcagaaacaacaatatgaatgatagctatttctctcacaaatagcaaaggccagaagacaacggaataacatctttaaggtacagactgaaaaacattgtcaacccagaattgtatcttcaggaataaagagaaaataaagtcctttttggataaactgagagattcattgccaagagatctgtactaaaagaactggaaaagaaagttctgcagtcttaagggaaatgacaccaaatggtaactcagatctacagggaggagtgaggatcactggaaatgttttctcaaagatgtaagaagttattaatttttccagtgggtagcaaatttataccatataatcatactttgccctatagtaaatgacacattgcctctttgtcacaaaacccctaaattctacaaatactgtctttcctgctcccttcctccccatccccaccactccctcaaaagagagagagagagaaaaaaaaaaagagaaagaaaacttgattttattttctagctgtgtgaccttgggcaaaaagttaacttcttggtgttttagtttcttcatttataacaagaaaaagtggagtaaatgatctcaaaagttccttttggcctgaacatactgtgattcagactaaactggtgcagtatgttaggagtagtcttcatttaatttttactattattatggttacagtaactaagtcttagtcttcatgatcagacaaactcataaaattcattcaagaactaataaggcttagaagtgtcttacacaccaacatcctttggagtctcatcacttaaaaacaacaaaaaaatatgctgccatggctgaagtaatcaaatgaggtaagccacaatacatgtgctctgcaaactgcaatgcccaatgcagacagaggtaaggtggtttgattatcccaactgccagattccctttcacattttcaatatattgatgctggatgccagtttcttaagtcatctcaaacaccaaggaactacattaaaccatatcagaatgtgcttagtcaagtgcgaaagttcactgcacaagtcttgcctgtgtgagaagcagagagtaaggaagccttgagcctccaaggactgggaacagttaattaaatattcagtgtgtccatgtttcacttgggggagaatttatgaaacttcaaagagctttctggtgatttgccacagagatggacttaagccaggctagactccaaggcttactggccaccaaatcctgggaggctgccctggggtagccttcctcagtcctgatgctctgtgacatttgagccgtgcaggctttctctcccgcctcagtgcctctgtgattctgccggattaagcaagcagtgggaagttcctgactcagacagtgcactctagaacgggttctttgaggacctgggtcccagctggctctccaaggtgacagggaaaaggtagaaaaatacagtcccttctttggcagcctttttacaattctgctgagtgccgtgtgttcaactgtttcttttcttccccagaaaacagtcactgcaaataacatgctgtttggtaacaggtctacttaaaatgccacattcatataattatttacaaatactggcataaatgaaataaaggtctgactaaaacagaaaatctcaaagcccaacactattgctttaatgaagagagtagagaaaggctgaataatctgctgtttcaccgcgttcttgagaaaccttttctccctcctgcacacatattccatgtttaatcttccttttttaatttgctcccattacccaacttatagcacataatgaagtatacatatcacctgtgttttcaaatggcttttagatagatttgaacatggtcaccagagaaccattacacctgtgtgtatgctgccctttggaagaaaaacgaccataaagtcctagggaaaaatactgggtgcataccactgagccaaagcttgcttttagatatccaaagcttgcttttagatatccaaacctccactgacgtcaccagctaactgagtccccaatatccctatgagctgcctgcaggtttccgacagcaaaatccaatacatgttcaaaatggcaatcattaatttctaaacgattggccactgtttgttgaataacagtacttctattctgatagggtggagttatcattcaaccagaggcagagaaaaagcacctggcttccttacttgctttctgtttagaagggtgctgtgcctcatgcgcccatatcctagggctcactgctcacaagcaccgtaggcctggagttctgcctgtccactttctgtccttcaaccacacaaatgtggaaaatgggtggtgctgagattctgccctcagaggggttcatttcaaaacaaatcctggaccttagttgctaaaatgcgacaccccttcccactgcttctcaattacataaaaacctcaagaaacctaccataagcactggcatttataatctatcaccattttgctatgcatatagggtgatatcaggtatccaaaatccccacacactagatgtatgccacctcaggaaccgggaaaaagagtccttacctctgaagaaccaacctgaagtttgtggttggtggtggagacagccatagagagaattcaaaatggcaacccgaagtcaatgtttcaaatgggctattcaccttctgtaggctggcaggagctcttcacctttactcctgtgctcaccacgaaacaacaagagcagcagcagcaaataaaaccccaactcaaaatgggctgcttgagatgtagaatttgcttttatattcttcttctctaaactgtgttggaaagggcagccaaaccccgggagagtatttttgagctaagaatttgacaactgtttagactggaagctccctgagggaaggctcagtctttaaactgtatttcgctgaggcacagtttgataccatggtggtatatggtagctaatatgatgcaatgatgaaggagggatctcaaacagccactgatctcctaatatcacaacttcaaacagcttcctgccctccctccctccatggtgagtaaggcagaaacaacaggttgatttgtcaaccacagacaatcagaggaggccttccttatggcgcctccctatatatggcaactcccctcacctagcccaccattctcccctcacctccatccctaccagatgtgacatgccttgtagactgtaaggcactgcaccaccataaaacattacataagacaaagtaatgtaatggagataactttgggaaattacccaaaaggcctcatgcctcggtttcttcagctttcaaatggggatcatactacctgatgtcttgcctacattacaggatcattgtgggtatcaaaatgtgtaaagcctatgcaaatataaccatcatcattataacattttcttaacctttgcatcctcaaaaaagggaagtgcaaagtgaatgtgtggttcttgacagaactgaaagaagcctgaagtaggagtgagacaggccttagctgtggttctgccacgtctcctcctgggtgcgggaaccaggctctctgctctcagtgcctctctgtatcacagtgagggtggtattctagctctgctgggagacacagaatgtatgctggaacaggcttgagctcaagagcttccccatgcacacgactctccaggcactcacccttttgacttccccacatggagaagcctgattctaaacttggagaggtaatgagacctagcaggtcaggctgggccagcccatggcagtgaccaggtcggtataagcttttcacctctgaaaatctttaaactatttgggaaaacaaattactctgaaagaaaatcagacagataccactttatacccactaggatggctatccaccccccgccaaaaaaaaaaagaaataaaataacaagtgttggtaaggaaactggaaaccttatgtgtacatgctggttggaatataacgttgtcactatgtaaagcaatttggtagcccctcaataaatcaaacatagaattatcatatgatcatataatccagcaatttcactcctaggtatatacccaaaagaactcaaagaaagtgttcaaagaaaaacttgtatgcaaatcttcataacagcaccgttcacaattggaaaaaggtagaaacaacctcaatttctcatcaactgatgagtcgatagacaaaatgtggtacattcatacaaaagaatattattcagccacaaaaaaaagaataaaggacccatacaggctacatcctggatgacccttgaaaatattatgctcagtgaaagaagccagtcacaaaaggccacataatatattattccatttatacaaataccatgagtaggtttatcattatttatgtctaaatatattttatttatatatttatataatatataattatattatctatatatttattaattatatttattattattattattatttctgcacagaggcagaaagcagattagtggttgccagtggcagaagggaatgggaaatgggatttccttttgggataattaaaatgtcctggaactagatagtgtcatggttgcataactttgtgattgtcctaaatgctactgaattgcacacttaaaaatgattaaaatggtaagttgtacattatgtgtattataccattaaaaaaaagatagccatacataggtgggaatgaggtggctgggagaagggacagttctggagctcctgtccaggacagccttccaaagccatctttgctgcactgtgtgtgcctttccaagggcctgggttgtacattaattgagaaatgattcctaataagtcccaagaagccacaggtcttttccttacaaacaggaaacaatcacatctcatggcagctcattacacattctttgggtaccatgagttgttttaaaaccgtgaaattagttctggcagagtttacagaaaaacacccatgagatgagactgaatgagttatgtaagacttctcgcactctgcttatgagatattaactccttacgggcccagccaaggacaccggtgtcatttataaagtagtgagcacaccctggttcccaccaagaccagcacgcggttgacaagaagcagcagtggagccctagatctggatgggctcatcgagcaattgccagcttcagcagctaggtacttccttctccacaagaggccggtgaggctgctagccaggtgaagggacttgctcacacaaactggctcaactaaaagttccagtcttttcccaggagttaggctgaccttttggggtggtgcacggaaagctttaaaatcaaccagatgtgtagaagattaatacgatcatcactggcctacagctatgccacaagaccagccccaacccaccaggaagataagtaatctgatccattgagcttgaactctggcattaaggagacacatatttcaaaagtttccgtctggcaatagtcactaaattaattattatacatgagaaaaaaaaacttaattaatgtgtgagccccaaacaatgaaatgagctcagaagctttcctccaccccttccccttcatttccccaacagacacacacacacacacacacacacacacacacacacacacacacacaccacctgcagtgtacttacaaaatatgtatggaatattttacctatgaaatatacttcataatttatttagaaagtagcaaagcattcaaaaatgagtttaaaaagcttgttcaagatttgtctcaggaatcaagtactgaacttggagaaaccttaggactctacttagaatccatggactcttattttagaaataacatgcttagttgtctggttcctgagcactagctcattggaagaggagacagggagcactgcagcaaggtaccctaagcaagaagcaagtattcaccaccagagtgggaagaacagagaggactaaaggcaagcagaagtcaccaaaaaaatggcaccatcccaagcctggagccatgggaagtgccagcaaaccctctcaccctaacaggcagcatggtagcggggaggggacacaggcttaagtatcagacagatccaggtctgaaagccagaccttgctacttattagctgtgcaatattgggtaagttacttcccctctctgacccctaatttccttctaaaaaggaatgatatatccccactctaaagtggaggcaagcatgtgtaacttacagggactttgtgaaaatgggataagttatataatgagctaacaaaggcatctagttattgctcaataaaggacttttttttttttttttaaactcaaggacagtgtattatggcgtgggctgattattcatgctcacaatgagaaccttgagtcatgccgagagggctgacatatagctgtgtcctcagtgagagggcagggaccttccctttaacctaccccaggatcccaatacctcaggcctccgtgccctcgtgctggtctctggaactacactcagactctctatctctctttgaaagctacttgcagctaactattcttctgtaagttatccaataaactaatttatcttaaggtgtcagtgttcaataatagcaaagttttcatgggaatcagttagcaagggggaaccgctataaaccaacagtgatgtttcagcaaaggtgacagactgatgaggaattcacttggggtctgggggccttcttggcgtcctctcaattagactttgtaagcagtttcctttttatggctagcctgaaacattacaatatggagtcgagacacttcatggggcccaagcactggctgttgctgtctggcacgtctttataagagttagatgttgatacacatccactcaaaacacaatagctcctcttctgatcgattcatatttatttatttaattaatttataaactgcattggtccaaaaacattgcgggggagatgagtcactaaggtaaacaagttcagatgccgaaaaatcccaccaccaagatactaagtatatcacatgctacatgccaagatgcactgaaaaatcaaaatcatttatttttctttgtcttactttcccctgcaatctgatgttcttctaaacacccatgtcccagagactgcaatagcagagaggtagataacgagggaggggcacaggaagagacaaatggctgaagcatttcagaatttatcaagatatgtagataggaatggatcagtctttgtcttgctctctgtttctgtctctcagtgcctctatctcttcaaaataataacagaaatattgctaagatcaaattaaaaaattgtctctggctctgtttcctatagagggctgcagccagggctgtgttattcacttgtctatctcctgggcctgcagccatgtgctacaccaagtctgcctctcctcccaacctcgtattcagccaccctcacgttggttgcccaaaactggctacggtgagagtatttacaccacagaaattggcaaacttagacatcagggctttttttttccttccttgctcagtagaacaacttctgtagagttaaacatttcccagcacactactgatacaaatacttgttaaataaacaaaagaagaatgacacgctgttccacttaattcaatcatttccaacacctctctggccctaatcatgacaaacccctctgtaagttcttctccacaacaggatgacatgccctgggattcagttatgaagcagagaaggaaatgccaggaagactaatttaaaacaaaatttcgttttggtaacagcgtctctgactcagctctggtggaaagtatcaaccttataaacccacaaggaagaggtgaagatttcacatcgtttcttcctttgatgttaaaaagagaaccttcttgaaggctgggacagcactgtgagaggagggccaccaggctagcagagagcagtcccttatagcagcctcctcttggtgaactcagggggcgagagactttccctgagcccgagtgtcctggctatagaccagtaactattatagcacctcctctgtctaccccacacagcatctacctcccagccccccaaactcctatttatcctccaggacccagttcatatgccgcccccacctctttgggaagaggcctgctccctcagcatgcaggtctttccccaggtccttcctgtctcaactccagcatttactatgttgggctgcagttagttcttatcgatttggtcactcctctgtccctctgtgaccctctcaagggcaggggccacgttgagcctgcattcccaatactttctgcagtgcttggcacacagcgattgattgctgcatgcctattaaagtgaaccactgaaaaactagacgtgaagggacttttaaactggaaatgtaatctataaagtataaagagttattaccaaaggcagaccacaaaatagagtggcacactactgccaacccttaggaacagcccttacttggcgcagaccctattgaagcatttaatcacctcaccactaggtaaaattcgtgaaaacacctggtgaacttgggtggaaaggttcaattaggaattacagaaaacattctctaagtagtggcctccccctcccccctccttcgacagctttatcccaggtttccacaccctccctgcccacagggctcagaggtaagaatattatataaggaacgaatgctgccttcatttgttttaataaagaaacagcccatttaaagaaacacagactttagtggcttagatatttctgaatgtgaatatgacccagaggctcaggaatacagaacggctgtcttgagaatgagcgtttttttcctatttaaaacattctggaaaattgctctgtatccccatgccaagatgaaaaaataaaaaacataagggctatttggaatgtctctgcattttacagatgactttaatgcataatgttataaagacatgaagctctctggcctcaaatgcccccagtgcagccgcctgaaagcccgggagaggcacgccacggtgtggaatctgtgagcagaccccacaaagaaaactcacggtttcagatgagctttgtggttgttcgtgggctttttagcttacagaagtctcctaagaggatgcaagcaggcttgtgtggaataatcccttaactgtatggtataaaatttgttaatataaaatgataatgatgatgatggtggtgtatctcagtgtaagaagctgttttcacatatatttcatcttgttttatttgacattgcaaccacgttagctaggtaggaaatgaattactgatgttatagatgtggaaaatgatggctgagagagggttgtggctggctccagatctaattgctaggcaatgaatggtctggcaccagagcccagagctactgtacaatgcttggtgggagtgggaagttgggtaaaaacaggcaccactgttaagtagggaagatttgagagaacacaagtgctggatccttacagacccaattctgcacctgggccctgacaaggacaggctacatgatcatgggtcaaccgttacaaccttctggtcaatttcctcatctgcgtatgtgaatagcaattcccaactcatgggttaatatgcagaccgagtgtttgggctccattacagcacaggtaggaaccaaagaagtggtagccattagtattttgtcattatttctagctttacagagggctattggtcctgtaaagaggctcatttcatttgttcattgtgactctgtctgggtgggaattctcctaaatacttcatgaggcccatctctctcttcccctgcagaagctttgccaaggacaaatagctcaagtatctggcttccatgttccgaaggaagaaccttgccttttaaggcataatgtgtgtgtgtgtgtttatgtgcgtgtatgtggcatgtgtgtgtatgtgtatacgtggggtgtatgtgtgtatgtgcatgtcacgagcctggtggcttatgtcttttactcctctttacttttgaaataatattcacctgttgttgtctttttcaaatatttctatgtctacagagatgaaaatctttgcccagattcaataaggcaagaaatcaattaaggttttcatttactgcttagcctcaaaagataagacactgagagaagacctaagaaagtatgtacagtttcctggaggtttcattctgggttctgtgttccagaaaaaataaaacaggaaggaaaacccttacatgtcctatttaaaacctaaatgttttgtttcttttttaaaaaaaaaaatttaaagccataccactttattttgattaatatggacaactccaacaaaagaaagatgcctcaattttttgaagacagtcctaaacctaacagcttggtttttaaatggttacatttaaatatttctttctctattcatttccaaacctgggccataaatcacccttaggaacacaatggcctgtgcctatagcaatttatcatttggataatgtcacttgttcaggtgtgcactaatttatgcctcaaattagaactcctgttggctgaaaccttgcctttcacgtgcacatcctgagcttcggccccttcggaccagctgggaatggtccaggcaaggaagaacctacgcaattcttcactcagggaagggggatggaggtgatgaaaagagagctggggcttaacagttctcttgagttcacttgtttagactcttaatgtttgtggcccaaggatgcaacctattaggaaatactcaacaagtccagactaaagaggaggtccctgcatgcaacgtgcatgtcagcttttgctgctccaagaaaaggcaaggaattgaacagcagtgggttcagagcccacaaggcagcattgcagagcgggagggatgccagagtggctgtcccaagttggaggcctagcgttgctgctaattccctgtcaaatcatctttctgggcctcagtttccctagcagtaaaagaattctaagatcttccttctctggcattctgtgactctctctcaggaggaagtagttgtttattactatagccagctgttattactacctacaacccccatgatatccctattttctccagttacccaaaaagagatggcacagaaacaactcttaagtttctgacccacaatatggagaatcggtacttacacattcggcagggaaatctctatttggaattctccccttctatctccactctatattttctctctttcactgtctctctcttccaaatatgtcaggaagagacaaagcactttctagcaccagcattaaaatgaactaccagggccaggtgcagtggctcatgcctgtaatcccaacactttgagaggccaaggtggcggatcacctgaggtcgggagttcgagaccagcctgaccaatatggagaaaccttgtctctactaaaaatacaaaattagccaggcgtggtggtgggtgcctctaatcccagctacttgggaggcggaggcaggagaattgcttgaacccgggaggcggaggttgcagttagccgagatcacaccacgggactccagcctgggcaacaagagcaaactccatctcaaaaaaaaaaaaaaaaaaaaaaagaactactagttaacacatgtttgctctgtgttagctgttatgtcatagttctttaataaaataaattcatttagtgctcccaacaacttctggaggcccacacgaatcctcttcatttgacaaattaggaaactgaggctcagggaggtaacctgtccaagattgcacagggaatggcagcatctgaatctgaagccagggccatctgaatcccaaatgagtactatttccacagtgctgaaatgagcaagttcgtgaatcagggccatttaaaatgtggctaagtgagtttgattgcttaagctccattggtaattaagatcaacggtagccaagaaggactacaaatatttttgaatttccacaaacgaggggtgtgactatagaattacatatgtatgagattaaacaaccgatttcaagagccacacacaaaaattagtctcattgcattttagccagggtttatatatttgaattgtaaattcagagatcctttctcagttaatatctctttacaactctgtgataatagctcttaaattataataggctctctctttcaatagaagaaaccagaaacctaaaattcacatttgttcattgttcttttgtaatgcagtcattgactttcttatatgtgtagctttaaacacaatttcctcatcgcccaagtaaatcaagggaaaatggcttcccagacacagtttttaaatgcaccagttttgtttaaggcgtgaaaattgtgagaatcccatggatccagggtgatgaatcactgcttccgccagtcacttccccaacctgcagctggagttgtcccaagctgctctctcccacaccccataggcagccatcccctctcaccatgacgccactctcctctgacacgcaagggaacacctgccagagggtgacttcaccatacccagtcactctgacaacagcccaaataaaaccatgtcagtcatttgaaccagaaacaacagtccaacagggctggggaattcaaagtcataggaaagacagagagaaagagggaagagaactgttgccacaaacaattaaaacccaggcacaaataccttaatgtaggaaatgcagggagaaggaggcagccagaagggaggagtcaggagtcagaagggactgggtttgagcccagcacttaccggatgtgcaaccttgggaaacttacctaccttctctgatcttgttgtcctatatgtaggatagaataacaggacccaacacatagagtagttgggattctgagtatttatgtaaaacacttaacacctagttagcactcaatccatgttagctgataatatattgtatcattgatataggattacatggtaggtctatgaacactctagagcccagtaggctcctctctctggcaaactgagcaaaaagagccttggattccagtcctggttttgccactggccagatgaggcaaatcacattacttggtgtcagtttccaattctgccaactaagagggtcatttcaatgccttccaaagacccttttatagctctataatatggtatcttttcctttacacaatgttcaataccaaattggcaacacaagtcacagaagtttaaatctcaggtgttcaggagcctcttcggaggaccaattcttctctctgtcccaggaatctgtagggggtagattgggcaggctttggggcctagcaatgctttgtaaagcctccctcttgattgcttggccaatctgactgcatccctcataagcattttaggcagtgacatgctgccttgaaattcttcctttcagtagaaaagtcagatctgtcaggaggagaataactccctgcttttgatttcttgttaagaacccaaggcgggaaaaaaatgcaaggagattaaaaaaacaaaaacaaaaactttggggcaaaggaaaatacatactctagcagctggctggccaaggtgcccgagtgaaaagcacccacaattctgcacactctgactataagtttttctctgtattaaggtgtctatagctccacccatgaacagcagccacatgcagactaaatcaggccagaccagaatggaatagttaaaacatctcttgccatgccttccggaatgccactcttttaatatcgcagaactcttatcagtattactaacggaaacttctagattgcctgtactgatttctctcccagggagttgcagtggtaatgagaaaaatggcaatgcctgggatctataagacttggtagtttcataaaggaccttatctatacactctcttttgattacctgcaacaatgctacaaagtaggcactgtgggtattattattcccattttacagatggagaaacaaccaacatgctgagtgagttaaggaccagtaggttaggagtagagttagaactggagtcatggctttcttgcttcccatcacatgccctctccctttttggaacaccttttatggacaaaaaggagaaaaaggcaggcttgaaggtgtcaaaggaagaaaattgggccagttttctttgtagtgaggctcctgtctatttagaaaaagtcattcaatgtaccttaaggtaagaaaaaccatctatgacaaacccacagccaacattatactgaatggggaaaagtttaaagcattccccctgagaactgaaacaagacaaggatgcccacttttaccacttctattcaacatagtactggaagtcctagtcagagcaatcagaaaagagaaagaaagaaagggcatccaaatcggtaaagaggaagtcaaactgttgctgtttgctgatgatatgatcctgtacctagaaaaacctaaaggttcatccaaaaagcttctaggtctgatacatgaattcaccaaagtttcaaggtacaaaattaatgtacacatatcagtagccctgctatacaccaacaatgaccaagctgagaatcaaatcaagaactcaactactttcacaatagctgcaaacaaaacaaaacaaaacaaaacaaaaacttaggaatatacctaaccaagaaggtgaaagacctctacaagaaaactacaaaacactgctgaaagaaatcatagatgacacaaacaaatgaaaacatatcccatgctcatggatgggtagaatcgacattgtgaaaatgaccatactgccaaaagcaagctacaaattcaatgcaattctcatcaaaatatcaccatcattcttcacagaactagaaaaaacaatcttaaaattcatatggagccaaaaaagagcccacatagccaaagcaagcctaagcaaaaagaacaaatctggaggcatcacattatctgacttcaaactatactatacggccatagtcaccaaaacagcatgatcttggtataaaaataggcacatagaccaatggaacagaatagagaacccagaaataaagccaaatacttacagccaactgatcttcaacaaagcaaacaaaagcagaaagtggagaaagtacaccctgttcaacaaatggtgctgggataattggcaagccacatgtaggagaatgaaactggatcctcatctttcaccttatacaaatatccactcaagatggatcaaagacttaaatctaagacctgaaacctaaagattctagaagataacatcagaaaaacccttctagacattggcttaggcaaagacttcatgaccaagaacccaaaagcaaatgcaacaaaaacaaagataaatagacgggacttaataaaattaaaaagcttctgcacagcaaaataaataatcagcagaatttacagacaatctacagagtgagagaaaatcttcacagtgtatacttctgacaaaggactaatatccagaatctcaaacaaatgagcaagaaaaaaacaatcccatcaaaaagtgggctaaggacatgaatagacaattctcaaaagaagatacacaaatggccaacaagcatatggaaaaatgctcatcatcactaattatcaggaaaatgcaaatcaaaaccacagtggaataccacttcactcctgcaagaatggacataataaaaaaaatttaaaaaatagatgttagtgctgatgtggtgaaaagggaacacttttacagtgctggtgggaatgtaaactagtacaaccactatggaaaactgggtggagttttcttaaagaactaaaggtagatctaccatttgatccagcaatcctaccactaggtatctacgcagaggaaaataagtcattatatgaaaaagatacttgcacacacacgtttatagcggcacattttacaattgcaaaaatatggaaccagcccaaatgcccatcaatatataaacatatatatgttatatatatgtttataatatataaaacataatttatatatatgtttataacatacattataaacatatatacaaatttatgtgtatatatacacacacacaccatggaatactactcagccacaaaaggaatgaaataatggtgtttgcagcaacgtggaaggaattggtatttgcagcaacctggaaggaattggagattatcattctaagtgaagtaactcaggaatggaaaaccaaacatcgtatgttctcattcatatgtggcagctaagctatgaggacacaaaggcataagaatgacacattggactttggagactcagaggaaatgttggggggtggcgacggataaaagactacacactgggtacagggtacactgctcgggtgatgggtgcaccaaaatctcagaaatcaccactaaagaacttactcatgtaaccaaacgccacttgttcccccaaaacccattgaaaaaataaattaaaaaatgtaaaaagtccttcagctctaaattctataaataaatattccacacatcctaaaaatggccaggtggatatcaaacttgaattggtaaattgtgtggtaccagtggcctgaactacaacaattgacagcaatgtgcacagttaatcccaattctgtgtttttcaaaattcatttatttaaagttgtacctgcacgttaaagagacaaataattctacaaagctttatagaaaaaccaacagtccctgcccatatttcttatcgccaagggcaaccactttcaacttctttagctgattcttttgatatttacctccatatctcgaaataacaggtttatgtaactactttttgatgtttctgttttaggctttatctactgaccttccacgacggaagatgaggtttttgctttctttcaagaactcccacccccaccacacacatgcacatttcctgttccccatcctgccaattgcaatttatcacagttttggttggatcaatattctgtgcttctggttttatgacaatgtaaatgctattcaccaatggggcatgttatatacaatgaatattctctcttttctgtataatattatgttttttttttctggcattaataattaacttttttgcttgcttaattttctctctacttatttcttattcaactccaaactctccaaatgtaagtttcaatgcattcagacaaatcaggtgttctatcagtttcaccttcttgaagctatttccccaggatcctgctgacctgctccagtctagattgttttgtttctgggctgctgtaaggctgttgtgttgtgatttctctttctcatgatcctggggactctcttcactctctattttgttggcttccttgttttttagagcctcctgtctttcttggtttatgccctcaagtttgatggtgcatctttcagtagtctcctgaaagagtgtgtgtaagctaacattttggagaccacacatatctaaaaatgtttttgttctaacctcacattaattaatagtttggttagatagagaattctacactggaaacaattttcctttgggactttgaaaaccttgcttcatcaccctctggtttccatgttgctgttgagacatctaacatgggtctaattcttgatcttttatacaaaagctgctatttttctttggaaaccaagggccttcttgtgtttggtgttctgaaatctcatgatcctgtcttagtgtagatctaacctcaccccttacactgggcatttgagagattcaaggagaaacttcagtgttgggaaattttcctgaatcaccttttgaattattttacccttcccatcccctgcttatttttctctcgttttttgcttctactcttcaatttttaatttattacagctcattattatttttgagtattcctttttttagaacattgttctttgctcatgaatgcaatatctctacttatctttctgtgttttttaaagtcaagggtattccaccctttccctccagttttttttttttcctcccttcgtagtttctgtttcctctaacttgctgctttctctgtatctcacattatatgctttccttaaatgactggtaattcttgtttatctgctctaatttaagagtggggcattaaaaagctgagtgtgatttctgggtacacgaaaggggttcatccactgttagaataatggattaggccatttccttggggagccacaatgccagcttctttggtcttttattcctcttagactagtcagataccacagagaaaattccagttgctgcttagagataaacatctggctgctattgtgtgggagacaagtccgaaagagaaagcagggagtcttcaattaaatacatgaacctatgtcttaaccccactgtttgcacactgtcctgagtccagagacactcagtttcacactacccaaaggataattgtctagctcaggagagggatggtaccatttcctagagtgaatctaggataaaattgctatttcaacagacttttcatccaacttatttttagcccatcgatttcattttcagagatacctggtgccatcagttcttaaacctgcatggcactgggttctgtgataatctgggttttcccccttgctggcttgggattcagctttcctgtatctgataagtcagttatctctattccatctgctttccagctcccaaaatattgttgccaatctattctccactattctttttggtctgtgggttattcttgaaaaagactctttacaaatcattttagtggattttgaggagagaatagaattacacatgtgtatttaatctgctatctctaaccattctgtctaagctccttcattctgtgtttaacatagtaaaacagtcaaatatactttggaccaatgatataatacagaaacattctttgaaaagaaatcttaatccactggaaaactgacagtttctttatggcatttattattacccacatctcaattctcatttctgactagtccatctctgcagaaccggtcctgcccaatggatttataatctgtacctttcaaatacctatttgatcattaatccacagtaagcaatgtgggtgcaaggccagccaaggaccaaggtgtgttaatttcatttactgtctcttgggtggctaacaactttccatctcaggttatttatgcaagttgaatcattttcatattcattattttaacggtgaaatggcaaagttttctaattattaaaaatcccaaagttgaatcaagcagtagcattctttagtttttaagaactgtgcacattgtggggaagcatcacgtgtttataagcatggcatctctgatcacactacctagatttgaatctctgcttccctttgtttgaccccagaaaatctgcttaaccactctgtgccttaatttctccatctataaaatggaaacaacaatagtacttaacctgtaagtttattgtgaaaattaaatgaaagcaaggtgcggtgcctcacacctgtaatcccattactttgggaggatgaggtgggaggaatgcttaagcccaggagtttgagaccagcctgagcaacatactgagaccccatctctacaaatatatatatttttaaaattagacaggcacagtggcgtgtatctgtagtcctagctactgaggaggctgaggtggaagaattgctatagcctaggagttcaaggctgcagtcagccatgatcatgccactgcactccagcctgggcaacagactgaggccctgtgtctaaaaataaataaatcaataaataaagaagagtgaatgaaataatatgtggagaaagcaaattccccagtgactggcacaaagaaagagctcagtagatgttgtcatctcatatttttaaggacttaggaataacatcaataaatatgtattaagtggcttaaggagaccagagacactccctccttgtccactgtgatagaagagaagtagcagtgtcgtctgagagttcaactgtaaattcagcacctagcaggtttgagcagaaatacagaaagtcaggttgaaggaggtattaggtcagagagctctaatgcagtgtaagtgatggaatctggacattggataggtgaacatcatccagaaggggcatgtcctatcattgtaataaaaaaggacactgccagtttctgaactatagtgacaccaccaaggcaacgggactgtgctggtcagaagaggctgtgccctatgataacaaatctctacctctcagtagcttacagaaaaagctttatttcttgattccatcaggtctgatgcagatcggtggtctttctctatcttgtttctctgccatctgcaacatcctgcctccaaaggcaccataggagagaaagagagacagaagaactaggacttgtatcctgtccatttacatcccatttgccaggactcagcctcacggccccaacccaggaatgaggggactgggaaataccatatcctctctgcccaggaagagcagacaggttggtgagggcagagaccattgcaggccactcgctttgtggagttctatctggacgcccagctgctttctccagggaacacctttctgtatcttcattgagtgctcacggttgtgcatgacgggctgtgtttgctcacgtcccacgaagtgtatgggtggcaaagtcttgaaatctgtgtgcttagctctcttaggcttcaaaatagtgagaatctaggcaggtaatgtgttaggagctccaccccagtgctgaatggggtctggaatctgttgactaaaatctagtcttcaaaatgagccccacttaattgtaacctttgcccatcttcccatcagcctgccattgaaatcttagcatacgttgtgtggctgaacttagagtctaactggccacagttgagggagtaaaaactactacagaatactatatctttattataattacctatcagatcaaatgtaataagagcaatattacagtatagtttacaaagtacttttacctgtgttgccttattttatctttgaaataatcctgagaaatagcataattatcataattttatataatagaaaatcaaggctcagagaactgaagcatcacatttaagatcaaaacttgtgttaatttcacctttttctttgtcttttaggtaaatgtcggatactcagtcctgcttagttccatgttatgggggagaacaaggtcttagaacttgaataacatataatctatttggataaaaaggcatactacatatcataaaacaatctatgaagattatgagagaatatattattagggactaatttagctcttctagtccaaaggaacaatgtcacataatgaagacttaactttttatatggcttccaagcctcctacagtgtcatgtctccatgcccttactcaggctgttccttttgcccagaaggactttctcttagttctcagaccaaccttggctcctccccaaaactttctccaactccccaggcagaattagccagcgttcttcaaggcgttctgcatgtgactctcctgtactgaagcatgaatcatatgctaaggatgctgattttgggtggaagtgggagaggcgaaggggatctatggtatctttttctctttccagatggagcttcctgagggtaggaattaagccttattctactgtatctccagtgtctagtgcagttcctaatatgagttaaatattcatggaataaaataataaatgaagagagagcacagcttcctaagatgcccaacatagtccccgggatattttttccaagcttgaatccaagccgaagaaaatggatggaagagaggaaaggggctgcaccagtggatgctgaggaattgctgggcttcaaactcctgccatcagaagaggaagctcctgaaaatagtggcctctctgtccttccatttccctccccaccttacctggctttgtttgccattttcaaccagtgctgtgattttcctccaaagcactgtccttggcatcattacctatcagcttctctctgtgcataaaggcccatgagagtatggagaaataaagggcacatgtattaggattgcttctgggtgcttctcatctccagcccgtcctcaaccctggggtgaggaaggtaggaccagggtctctagggtttctcaaccctgtaggtttattctttgcctaggcactaggtgaatctgaatccatgttcaaaagtaggacacatgaggcgaaagggttgatcaaacataaaaacccccaggttttttttcccacggtttgaccttaaggaagtcaactaatccaactgtgtttcagtttgactcctctataaaaacgagtctaatgatgcttcacccaacttgtggaggagtggccaggtttaattaaccaatgctcatttctctcagcactttggatgtcctccatgggcacaaaattatgttattacttggaataataataatagtttcccctaataattctgtgttattattgcatttaaggaactgtattagaggccttctggaactagtttaatacctataaatgtctctccctggcaaaacaagggagcattgcctggtgattatggtttgtcttacatttcaaaactagtccgtttaaaccctcagcagagtccttaaaacagcgcctggccaagggggacctctttcaatctcaatttgctggaccactgacagcactgaacttgaacaaagtggcttgttttcacagccgaggacttggcaactctaagggcccaacttacaaacgtggaaagataggcacagagaaaagataagcagacccagcttcccccactgcagccagagccaggtgctgaaatcacagatctgaccaccattgcccaccctccctgccccgccaccacttacttccaccggctccccttggctcttcattagagtccagtcaacaccccccgaggtgtgcagagccctccagctcatctttagatgccccctcccttgcactctgttcctccattctgatcttttaaaaaaaattttatatttcattgacaataatagtatatatttacactatttatatactataaactatataaactatatttatactatttatatactatagtgtatatatttataaactatagtgtatatatactataaatagtgtatatatactataaatagtatatgtatttatttactataaatagtatatatatactataaacagtataagtatttatatactatatatagtatatatactataaaaactatatgtatttatatactataaacagtatatgtatactgtaaacagtatatgtatttatatactgtaaacagtatatgtatttatatactgtaaacagtatatgtatttatatactgtaaacagtatatgtatttatatactgtaaacagtatatgtatttatatactgtaaacagtatatgtatttatatactgtaaacagtatatgtatttatatactgtaaacagtatatgtatttatatactgtaaacagtatatgtatttatatactgtaaacagtatatgtatttatatactgtaaacagtatatgtatttatatactgtaaacagtatatgtatttatatactgtaaacagtatatgtatttatatactgtaaacagtatatgtatttatatactgtaaacagtatatgtatttatatactgtaaacagtatatgtatttatatactgtaaacagtatatgtatttatatactgtaaacagtatatgtatttatatactgtaaacagtatatgtatttatatactgtaaacagtatatgtatttatatactgtaaacagtatatattttatatgttaaatgatgagttaaagggtgcagcacaccaacatggcacatgtatacatatgtaacaaacctgcacgttgtgcacatgtaccctaaaacttaaagtataataaaaaaaataaaataaaataaaataaagtgtagtgttgaagtctccagctatcttcttgcatttggaagctctgttattaggtgctatatgtttataattgttatgtttttctaatgggttaacatttttattgttttaaaatgtctccttttatatgtagtcacattttctgttttaaatgatacttttttctgttagtagtgtatgcattctagctttgttatgattgccatttgcaaaatatattattttctacccttaaaaaagttttatatttcattgacaaataataatagtatatatttatggtgtacaatgtggtggttatgatacacgtatgcattgtgaaatgaacatatcatcacctcacagacttatcatttctttgcagtgagaacatttaaaatctaattttttagcaattttgaagtacaggcaaatgtcggagagattgtgggttcggtctctagaccacggcaataaagcaaatatcgccatcaagtcacacaatttttttggtttctcagtgcatcgaaaagttatgtttagactatactgcattctattaagtgtgcaatagcattatgtctaaaatactttattgctaaaaagctgacacagaaacatgaagtgagcacatgcttttggaaaaatggtgctgacagacttcatcgaggcaggcttgcaacaaaccttcaatgtgtaaaaatatgcagtatctgtaaagcggtgcaataagatgatgtatgtctgtatataatacattactattaactatagtccccaggctgtgcacctgtgcaatacaacaccagaacttattcctcctgtctccatcctgggcttttgtttcttcagtaacaccaggtccaatctctccttggcgccctgacacaccttgctcctagcctggccagccctttctcccgtgtctttacctctagttcccaggtacacgttactgccttcccatgtgtgggctgaggcccctctagggtgcacccaaaacaccctgtgtttgtcccctgtgccaaatcacttggcagagagaatcatacctacctgcttacttccaggtttgctcatatactctgtgcaggcatgaagtatgtcagtcttgggccctgggtctgcacacagtaggtgcttcatcaatattcactgaatgaatacaaggatacagttttcttttctctcttatatactattttcttttactcaatgccctgattttaatgctaatccttccctaccctcttttatgccagtcacaggtgagtaatacggatgaagaaatgaaaaagaaaaggaagtagattctttgaaaggagagagagaaatactgtgagtgagagggattaggaacaaggcaaagtgagagagaaagagggatatttggatggggagagactaaaatgaaatcaaggaacaagtacaggattctatttaggttggtgcaaaagttattgcagtttttgctattacctttaatggcaaaaactgcaattacttttgtgccaacctaataataatatgttaaaatgcaaaaaataaaatcatccttaaattttatttttcaggaattttccacataagagaagtgaagagggaaggagaaacccgttagaattatttacatatatgatttccttttattcctcataccttattagacaggaattcaagctacatttaacagaggaagacaaagaagctcagagaggtggagtaccttgcacaaagtcacacagcaaagtggcaaagcccaatgcagaaccagcatgtgtttgaatcccaccttgcccatttataaccaggatgaagtgttcttcctttgggactctagagccttcaaaggtcccttctctttgggatgcagaagagaaaggcagtaattaataactaagaagaaaaagaaacttagcacacagctaaatgctgcactttgaagagtggattcttgcttttgcatgaaagattaaaaaacaaggatttctatctttcatcagtaggacaatgaattgaactgattttctttggctcttggtttgtctttcctatgattaggtacatgtttctgagccctgtgtacataagcccagcacgaaacttgctatttccttgtcacagcaatattttccacgatggtttggggcaggcagagagaatagtgctgctggacttttgcaaaaccagccaaaggaaggccaagaggcatgttgaagaacaaactctacaccactgtttgcctatcttaaagcctccctgacgataatgaatagattccagcagcccagaccattactgacagctaaataacttggtctcactctctggttttctacatctaaatatcccctccctctggggcatgagattaaaaacaaaaatctcgagcagagcaagcaacagtcttgtctttgatttatgctattactggaactgtagtccttgaaagaaattccttcaccaccataatgaggatgaagattccgttaactaataaatgcttcaggagtatgctctgatgctgttgaacttttcatgaaaccatgatgtacaagaaaagaagaaagatttttaaataacactatacagacacacatccgctatggaattagtcaaggcttcgaaacaccatgtgtaagagaaccaggttgacaatcagtgataatacatctctcctgaaaatactaggtaacttagccttttcttcattcctgggcctgcctttgtaaagggaagggagagaactaaaaacctatcagtgattcaatcagaaaatgcaaatgaggtcaagtttcttacaggcttctgtgagatttctctagagacatttccacagcatctctgctgctggcgcccttcggaggctggggctcgtctgttgggtgggaggaatgcagtacgagcttcctcctttttcctcggacctgagtggatggttgaattccagtaaggggctccctagtgctttgggaatatcactcctggactgaagtcaaacccagacacacacacacacacacacacacacacacacacacacacacacacacgggttgctttttcatgggtggaactcatggccggcccctctgccctgtctcagagtgaggaccctgcatcccaatcaggcaagagggaggctccttaagtgaatccctgtgttctgaaccgatcctgcctgcttccctgcctgcttccagggccagcatctccacccctgcagatgccccagggcagtctggaaggagctgtctctcacacaaccacgcctctccctaacatcccaaactaaaagtgttcatgcgtgtgcacgcggtcctcccctgggccacagaagtttgaaaagccttccctgctatctttgattgggaaactagtcgattgggacaggctgacgagtgaggctgcaagtcaggacgctgcactccacctcccatcacgtgagggtggttcagggaatttacagggtttctctttgttcagcacaggttctagcacgtgttttgaaagttgcctattttttttaacccaaaggtaggtaaacaccaccaatcaaagctctaagccagttcccttaagttttaagattggacagtatcaggtgttgtctttcaaggggttgaaaggaaggaagagacaggaaaatccccctcaccctagctttaagggtgttggaggtcttgaagaaacggacagacccttgattaaaccttctatatttttatgtaaaacataggaaaagggctggtgaaaatgaggcctgcattgcgtgaagaaggtttaagatttgagggaaaaaaggcgcattctcttttctgtaaaatttttaaacattttaaagctaaatgctaccctcttggcctatagctttcacactgggagtaaaggcagaggggtgggggtggaggtggcaggtgaatgggtccttcaggaaactttgaggaaaacaacacaggtttcccctaaaccgtaaaaacggcagatctggaggtcccaacttctaattttcaatccgtcggcttagtcttggtttttcattactgaggttcccttgactatatagtatctcacaatgtctctcaaagtgcagtcacagactacagatgagagaactatgagtgaagctgcttaaaatgcagattccaaagtccttccctgaaggattctggttgtggtacagggatctgtaaatggggtggttgatctctaacccccaccccccaccccagctctgcaattctatgcttctagactctctggaagggaacaccaccaggaactgtggctgtcccactgccagaggatacctcacctatgccaggtgtcaccaattacctatttccagctgtagggcctaggaccttggccaacattggctccttccaccaggtaacagggccagttaggctgtacaagggatccatcttccactggagatgcctccagtgcctccaggttcactgatcattggctgcagtgtgtgctctacttagccaactcccccttgccatagcctctttccgtctccctgctgtgtgctgttccctttcagtgctgactcttgtccccttggctgtttggatccggggcttctagcccctacgctctgcactgggtccgctccatctgctgcccgtgtcctggcgcctgtggtccccttaagtcctccagaaggtagggctcgcattaagagcctgctccttcttcctttcaccacccaaagtggctcaaaggcttccacgtgactagtaactcaccacttttatcccctatctctcctctgtattcctcaaaggctgggaacacacttttgtcatttcacatcatattctagtgatttgtatctctttctcctccctgcctaggttgtaagctctatgatgccaaggactgtgtcttactcatctttgcatccgtagcaactagtgtggggcctgatggtactgataaaaacatttactgagtgcttactatgtggcaggcattgcactaggtgcaagatactcctttgtgcaatacttgctatgctactctatcctcacaatcactctacaagagccccagttttattaatcccatgtgaataagtgagagcaatgaggccaaagggtttaggtaattcgatcaaagtcacacagctagcatgtggtcagctgaggattggaatccaggcagtctgactcctgagcctcatactaaaaactcaaagtttgctgaataaataaaggaaatctgaataaagcaatgagtagcagtattcacagaagcacggaattttagaactaaaaaaaatatatacactgtgtagtccaaaccctgattgtattgctagagaaactgagggtgagagcaatgaaacaaggtttggtggtaaatggtaaaactcttattttatcaaagggaaaattggggttcaatttcactcttacttccacaactgaaattgccagaatttgatcgtttaaaagaagcatagttatctcctagttcaagagcctcattttgcaaaggaagaagttgtagcccaaggagtgctatgacttgccaaggtctctacttcaccagagcagaactggaaatgaacctggctctcctaactccagctacactaacacagacccatgagccagcccattccccaccactctcccatcccagcttcccaggtcaggtacagacagtccaaccgtccatgatttaacctcagtggaaacgctccacactggagctcaaatgcaaggcaagcaggtccatccagatccagttctttcatatgacaggtgggtagagttacaggctcacattgcaactggggatttgtgagatccacctcagaagaaggcaatgctccccacaacgaggctgactgttgagtgtgtgaatcagcatctgggtggtgaagcaccccaggatgtatacactagccagtgctcagcaatcagcaccacgctttctggcaccacctagcatgcgcattagctgcctttaaaaatgctgatgcccagggtcaggcccggacaaatgctaacagaatctctgggagtggggccaggcatcagtatttcgtttaaaggcaccaccccctggctccaggtgattctaatatatgctaagctaattcataaggcaagtgaaatgtcttccatccaaattagcagtgtcacctggaaacgtgttagaatccaaattctacattaggtacccttcattattttctttctttctttcccatctttccttcctttcttcttttcttccatcctttcttccctcccctttccttccttccttccctctctttctctctccctcccctcccctccctcccttccttccttccttctttccttccttcattcttctctttctctctctctctctctctctttctttttttctcccttcctttctttcattttctcccttcctttcctcctcttccttccttcctcccttcctttctgagacagggtttcaaactgtcaccaaggctggagtgcaatggtgcagtcatagctcactgcaatctcaaactcctgggctcaggcaatcctcctacctcagccacctgaagtgctaggagtacaggtgtaagccaccacaggctttccctgttattttctctcatagcactctattgttagttttcataacacttagcaggatgtgaaattatacacttgtttattttatatcctttgcctcctcccaacctcagatggtaggcttcatggatagaggccacacatgttgtgttactcagcacacctcatgcctggcacacagtgggcactcaatacacataatcaacaaatggatggatagacattaggtgcatataggcaagacagatgtctgaatttttcattttttggaattcattgctgtagccttatagagacagaacacaagcatatgtaataggcactttatcttccccagaaataaggaagtttagcttactggagtaggtaactaggaattttttttagacaagttaccagaaaaaagaaaacaccaaaaataaataaataaaaacagcaggtgctgataagaaattaaaaaaaaaaatcaatgtaacaactttggccataagtgtggcttcgcctaaaatcctactgcttctttaggtcaagtccctaaatatttattaaatacatcttgggggtggccagcatattaatacattttttttggagaaataataaagtttaaaacatggtttatggccttcaagtttgttgggaaagtggagcttattgaagtagaattataagaaggataacataagttaataagtagtgaagtgttattcccaacacacaggccggtggaatgcatgcatatatgtgagctggcagatcccctttcctaatttaggttcaggggagttccaaggaagagatctgcatgaggagagcacactatgggctgccataatcaggaggatctttgtgaatgaggaagaggtttgggacttgcaaacattcttgattcaaccaggctcttggaagttaatgtagtcaacattttcccctagtccttgtgtggagaagaggtctaatctatgaagtcaaaacaaactttgttcttggatatgatttgggggttcaaatgaggagacacaattatctctttgagctttaaatatcgttttgctgacagaagacaactggctcttttcatagacatcttcccttattaaaaaaaaaaaaactcctaaagtgccaggaactggggtgttacattcagtaataaaatccatgtttcaaaacttggtgtgctcatggccatatgctgtagtgattaaatcagactagctggattcaaatctcatcttctgccatttaacagctgtgcgactatggacaaattatataaccttcctttgtctcagtttccccatctataaaatggggctaataataattcctcactcgtacgattgttgctgtgaagattaagtgaggtgatttttgtaaagtttcataagaaatgctatagaagagttagctctcattggaaaccaaacctaatctcaactcacacccatgcaatctcccattaagatctatttacttatccaaaagaccacctaaaatgaactgcaaatctgctagaggacagaataacagctggccaaggacaaaataacctaatggttgtggaaaaggtcacagcagtgacttcataatggaatataaaatatcataaagacagtccaaatgggctaacgtaggactgtatggctaggaacttctagagctgcctactgctgatacctgggacttacctcaagtgatgagagcattgttggtaggagaaaagtatagggttcatcctaatttgaatcagttgctatctttcctgtgccgtggcatcagaggtatctgttgtcaaccagggcaccttctaaattcttgtgccactgttaccgagcagaaccagaagaaagtgtagtggagatggctggccacaatccatcactgcttctagaaccacacctcagagcacatgctaagtacttctatgttcacaccacccaagcacagagaaggcattaatgcaattatcatacaggaaagtcaggtttgataggcagagcagtagaaatgatgtagtgattctgtggaagtcactgtgacattaataactatattcactattcatcagagaccagaatttgaactatggcaaagctatcttagagtctcattcaggaggttggtttgaatcactgaagttccatagagggtttgattcaagatggcctcatttataagtcccaaggtcaagaaccagaggcattatagtgaaatcctagcatatacacagtcagcaccaagtaggcctgcttccccatcttccgtctccatccttcacgtgctgtgatgccaccttccccttcacacaaagcatggccccgaagaacagcgaactggtaccccagcagcctgactctcccagaacctcctcttctgtgacatacaggaattgggttagctaatttctaacatctttccacttctaacatttgaatctaagattgtctttagtaggtatagtttagatgtaccttgtctgattattgggcagaacaagcagcggccatccagaataacatgaagagtatccttactgaaaaactctctccccttcttcctatcacagttcctgaaattctagcattataaatatattcctttgggcttcaaagcccttttaaattcttaaaaggctttaaattctatgaaaaggcaggtaactctgaaaacaatttaagccttcactagttctcaccttaggcagggccaattggtcagaccgctttccaaatatgaggaagccacaggccctatgggaaaggaacactggatggggatggagtggatcccagtctacccaacagtaggaactatgtctcattcatggccataaatcatgtcctagtactggcacatgcttggcactttttacattttcttttcttttagaaggaaggaaagaaaaaaggaaaaaagaagaaaggcaggattaatgaatgaacaaaccagaaattactactgagagtattttccacacctgacctggtcagcatatccccaagggcaccttttcaacttgggtcccgggtgctaaaaacaacccctgttctcaaggggcaatttccagcctggctgctgacttcccttagctcagagagggcccttgctatcactgaggactattcagggactgaggcagcccaggccattgcaatgctgagtcctgcaccagttctaggcgctacactttttttaagcacttgatttaaatgaagaaagaaattggcttatatttttagcagctcctgctactaaaactcatttgacaaaagtgccaaagggacagttaagtctgagtatgattttttttttttcccatggaggaggaggagggtataatttatctgaaaatgactggtactttcctggcctggggacattattctacctgctctctctctctctctctctctctccctctctctctctctctctctctcttttttttttaaagacacacctgttcttttccttcccatcaaattccaagcttaagatatttactgtcttcaggtttagttcctaaaccctaagacaatctcagaaagggaaaggtatataattggagtctggaaactccataactttcagtaacattttagaattagcagcatcttagtgggtataccaaagccctccgtgatgtgagtataatatcaagttcttgtaggagtataacattaagcccagttgaaaaacaatattaacgccatttctacatgtactgggtatcagattcaaagtgtatgacttcagagtgccccaagcccctcttcccaatgtttctattactgacttgcttagtatctacctgaggtcccctccattacagctatggggagaaattcttttttctttttcagggctgaggcactgttctgtcagaaggctctgctaaaatacacatatattacttttgaaagtcacatattaacccaatgctttccaaacgtaaatgacttcaaacaatgcgttagctcgtggaaattgagtcttgaaagaacaggagctttagggctgctaagaaaatgtctggcacgtaaaaaaatccaaaatgaactcatttgtttatttgttatttggaaacttttccccagaaacacaaagttatgaagagtggttatgttcccagaggacagtctgaaaaaatatgttttataaccataatgtaattgaagtgtactcctaaagggtatccctgaaccacactgcatggccaggcttccaagggaaactgtgttcagacaaccagcttggaaggccaggaccccagattcctgctgctgggacatggcgggtgttggagctgcctcctgggagagagggggctcctgaggaatctgggttgggtgagcagctgcctgtgcgggtccctgggaagaggccagctgcatgtatggatgtttgctccgcgtgagcctggggctgctgattattgctgcttccagttccaatcctataaaggattcttgaagactcctttatagcagtcaggaccattacagctgtcaaaaaacgatgacaactactgtttgagatgttttatagacagccaggtataaccgctcattcatgttagtaacccctggtatagtggttggcatgtatttggtgctcaattagtactggatgaagtaagacagattcgtgtacatatcagagaaaaactagtaccaactatgttggacatttcattgaagagggtcactagggtgaagaacaggcaatgccaggagtggtgggcactgcacctggaaaaggtataaggcaggaggcgggcagggagctgacacttgaggagacagctatgagggagtggcggtagctgtgaggagcaggagggagtgctgctggtgggaaagtcagggtcaggagaggcagcacccttccctatcctttcagccttgactcagtgtctcagcctggcgcaggcaagtaaagagacatggtaggtgaagaaggtggccctgccaatctagtaatcagttccaggtagagaaagtcttgggttgggcccaaagtacttcaaagggctccagaaggaaagagaatctatgaggaggacaagggaagggaaggggaagtgaagacactctagtgcacgtaaagtctggatttagctacagtgtgggggtctgttcatttccagcatctctgggtggctagtgactgaggccgctgagtgtggagaggacacaccctctgaaagcccccacacaggggagagtgcaccactctgcctggttcaggcgcatggggcctctgtgaccctcaaagagaaagctcctgggaggcactggggcagaaaccatacgggatatttctttataaccttcggaagaaagtaataaaagtcaagtcttcgttaatagcttctctaaggaccacctctttacattttccttctctctcttcttcctgattcccattgattttgattctctctcatgatcagacaacggctctccaccagtagttctctaggctctctcaaacctctgtaaaggtgcagaattcatttgcattcattatggtctcagggcaactcatttactttcatcttgcaatatccaaagagttgctcatttacttagatcatttaagggtttccagaaatcctgcaaagaagacatcaggtgtccctctccccctaaaactttcagaagaagttttgcacaccccatgggtcggggggagtgatgccttggagccagtgagagaaccagtcagacagagcattcagtaagaacctatcagggaggagatgcctttcttctggcccactctggttcaagcctcaccttcgcttacctggactgctgccagcctggagacaggagatgcctccaggagttttgcagcaggaaggcttcatccccactggcatttatttataccttagggctaatggaattcagcaggtcactgctgcccggagcaccggcctgttcaactctacatctcaccgggatggacgattccctcctcagtccctgtatcagtgagcagggggcagtgagggtgacagagggccttttcaggacctttgaggtcacgtcttagaggttttaacttccacctccacatgggcccgattctgccaaaaaatagttgtctggccacatctctagcttgagttctagtcccacaggatccccacattgactaggaagaaacttcacacatctggaggcctccaccagtgactccttccagagtcatctgttccttacatggtataagctcgccaggacagcacatggaaagagtttgtcagttcttccatgagccattgtcattttatgaagcaatccgctgaaagggtagggcccagacacttgagattcctaccaggagatggaagaaatctcacagagcaccagaaaactccggaataaaaggccagtgctggtgatgatctctggcttccgttcattggtaaattcacacatttattaatgtcttcagtgaacacatactttattcacaacaccagaagacaattaacatactgtcttagcagtagttaatgtctccctactgtactgtagtcttctcatggtgacctaggctttacttagtttagcactgtgcttggcatacagtgggagcacaacaaatagctctgagtaatgaatgaataaacaaataaatgaacaaacaactttaaagatatcccactgagcacatgactttgtgttagaactcactcaaaggtgaggagtcataccatttgtcttggatttttgtagaaaatatctacttccatccataccttcacccattttttaaatagtagttttgcgcttattctttttaaaaataaaaaactttatttataattgtaatatgtattggcattcaaatagaagaaagaattatttatttagaaaatgtgggaaaatacagatcagcttaaggaataaaccaaaacttgtccacaatctcacaaactctgttaacattttggataattttctgccactgtttttttctgtatataaaaatttacaaaattgggatcatgctgcagatgcagttttagatattgatttttccacttaacattatatcgtgagcattttaccacatcattaaatattctttgaaaatgttacacttaatcgctgcataatattatattatagctcttcgattcttaactaaggcagatttattgtccttaataaatccctaaatcactacacaactgaaattgttccctggcttctgtaactgtcttagtggctgatgcagattgaaaacttttacaatatgacaagtacttccaggcaagaaaagctgtttcaagtatggctggatctcatctccagctttttcctcctcaaagctactaattcatacaagcatactaatggctttggaatgtttattctcttaaaattggaggctctagggtacacaagaaaacaggcacagaatgtgatgagaaacacatggcaagtgtctagttgattcacaaaacactcaagattttcttgggcatgagggaccacacctcaatttaatggaacagaaatattttagttctctacagtaaagtgttgttgctaaaaatatatgtgtgtgcatgcacgtgtgtgtgtgtatgtgtgtggatccatcaaaaagagaaaccccaattcaacatagacacacagctatgcacttgtatagtcagcgaggagactgagaatacctggagaggcgatagtgaaagagaagcagatgaagggcctttacagtttggggaacattaaataagctgtgtcttccgctctcttctaatgaacaactagtttccaaatgttactgtattctctttcactccctgggtctcatccttttccaatccagtcttctttgccttgaagctggagcatttgacagggtctattgaaacttctaatgaggggaggttacatggagagctcactccagaacagccaggacaaagatgggatggtatgcctcgcaggggtcaccctcacgactcagtggtcacacctgtgtcctctggctcattctctcctgacatcccagcttgagagtggatactacctcctaatagcaaaggacacacaacagacatctctcctagaaagctatttctgggctgctcattggccacttcaatggaaaatcttccctggaggtcaggtctgaggcaggtccttacatttgctataggtgagtctcctagaagctcacagttatatagctctgataatattttaatacaaaacaccatatccatgcatttgtccccacctcatttgggtattttgagttgagggagagagacaccacactctccagatgaatctttctcaagtgctttttcatcacgtcatttcacgactcttgaactcaaaaccattccggtgacctactggaatgcaccttagtgtctgtgtctggccaaaatggtatgttgcaatcaattctgaggatgtcagaagaaatacttgtggctgattaatacttttaaaaacaagcgagtaaggttcaaggttgcccctataaaacatcactctcagatatgcctcctaaattgggaaaaaggtgaagtggcagctaatatggtaggaggtacacaaagcctacaacctgaccttctgggacagtgtctgctgagctgcatttacggatacagcaccatcagccacacgaatgcctgctaactcttctctcgaccaacaaaaaaatttgtatgttatcgcaaagacagctagctgtggctcaatatctattatccccttcttccatagccagaataaagaccatattttccatcctttcttgcagcttagtgcaacttggtgacaaaattctagaaaatgagatgtaactacaaatgaagcacacaactttcaggtggggccctagaatgaggctgacaatctgcactcccaagcctatcccacaccacccctccagtttgccaggaattttcctggttttagcattaagagtcctgtgtcctgggaaatccggtagtctgggcaaaactgggatattagtcacctacctccccatttccctctttcctcagcctatttcctggagtatggacttggtggtgagccaccttgaacatgcaaataaaggcagaccccaagaaagacaggagaagcctgggaccctgccagcttcatggagcacaactgttactccagctcagacttcgatgtaaaggacaaatcaatttccatgttgtttaaactactaatttttgaggtttgtagcatactcttagacatctatacccaaactaatgtatctaattgcatagtttaccttgctgatgaaaaaaaaaatggaggtggggtggagagtcgattcatcaaaatttaaatatgccagaggaaaagtgtcattcccaaaaacatcatctgtcacattttgttgaggaaaaaatgttgggcaattttataggactgaagtccgaggctttacctggcatttctctcctgctgttaccatgcctacactgtgtctcccgccatccagccttctcctcgtcccatctaaccttctgttccatcccaactgagtgttctttttttttttgagacggagtctcactgtgtcgcccaggctggagtgcagtggcgtgatctcggctcactgcaagctccgcctcccaggttcatgccattctcctgcctcagcctcctgagtagctgggactacaggcgcccaccaccatgcccggctaattttttgtatttttagtagagacagggtttcaccgtgttagccaggatggtctcgaactcctgacctcatgatccgcccgcctcggcctctcaaaatgctgggattacaggcatgaccaccatgcccagccgagtcttctttttttatttgtattttttattaagacggagtctcactctgctgcccaggctggagtgcagtggtgctatcttcacttactgcaacctccacctcccaggttcaagtgattctcctgcctcagcctcctcagtagctgggattacaggcatgcaccaccacgcctggctaatttttgtatttttagtagagatggggtttcaccacgttgaccaggctgatctcaaactcctgaccccaagtgatccacctgcctcggcctcccaaagtgctgggattacagattacatcccacccgattccaaatgagtcttcttcctgggtccttcctttctatgtccctttctcatttgctactctccagttaaaaaactcttctcttttcccttaagttcaccaaacccaccaagcccaatctcctttaccgttttttgttaccatgatttcatccttttctggaatctggcaacacctctatgaatttggcatataattactaatatctttgtactgtctttttcatgtatttaagtcttgtatctctggaaaggttctaagatccagggaggaagagtggttgagagaacatagcttaggagttagaagatctggactgaagtctgggttccaagacttgcctcttgggtggccttggatgtcagtttcctcatttataatgtgacggtgattataactcctctgcctttgcaccatgaggttgtgagaactggacactataggaatacatcatcaaccagtaagcaccttagccatgctaattgttcttcagaagctatcctttctctaatgtcccactggacagccctagcatgcttaccacagtgctggggatgtagtgaatgacagccccataaatctttgtacaatggatgaggaaaaaaggtaaaaataacagttcctcaaatattataaaactgcatagaaaagtctctgcctggacatctccttcaaatgcaaagaaggcacaaaatagcggtacatgtcaaactgaggtctcaaaccccagttcaggggcaaccttgaaccttactctcatgttttcatttctgagtggttttaaaagctaaatgactccttaattcatggtaataaagtctaagtcaataatgctacagatccaaggttagttcctgtgaacagcggcaccacccttctcagcctcaagtccgtgtgctccataccttgacatgaacacgagtaaaaatcaaaatggccccagatatgtcctaggatgccaagaaagaagtggcttctactcagcaagctgcaaagagagttgctattttcaggtgctctctagtttggcagattaccaaggtgatgatattaagcttaagactgcctgttaatggaatgataaatgtgagaaattcagtgaggccacttaagcaaacaccaactgaaggataaaaagcatcacaaagcccatgggggaagaattcagatgcagatttgcccagcagcccaatggacctacttccatcccccgatgaggggctgcgcatttgttgaggggaagtcattttgttcgcatctgagagtgacacagcgacccctcgacaatgctgagacctaggcccaatgcctcgagttttccttgcttgttccccttttcccctctcacactgcaatagtatattttccttcaggaccctcatcttcgcaggattttttttttccctccaaaaaaaaactatctttgttttcagaataggagtcgacaagctcggcatcactgaattataaatgattagtagttatgtttcctagatatatttagagctttaaagggattggaggttcttaaacacagaacgtggacttgtaattgtgaagctcaagtgtctacaagaccgggtagcagtggtattgtaagggaaagtggttttgaagggagagacaccccagtcacttcagaataacataatttggctgctgtcttggctgcatctgcacaaagtgggaccagaacactgcacacaaattgctctgatcaaatcaaggggccctaaaggagatcaggcttggcttaaaagctcttgggctatgagttaataagaattttaataaaaatggaaagtatagcctggggccatggtacaatatctctctgggttgctggtgttctatcagtcaatcatataatctttctgacgttactaaaacgaagagggtaagcaaaaactgtgtggaccaaagatttcaaaaacagaacctacagaaacaccatcagctctctgattggccttccagagccaggagatatacctaaaagtgaagtcttccccagaatgtgagacaccagtgaaaacgacctgtgcccaactcacttcacatcacaaagcagtttccatacacatataactctcatggcaatcgtgatttcaggttatgaccatctctattttacaggtgaagagtctgaggatggggtgtgggagccttgatccaggtctttgactcttacttccctgtccaaactcctcagtagcttatttgtacatttgaactcaagctattgaatcgttacgatcctctgctttggtttactattctgacatgcaaccaagtagatgactggcctctgtcatttgattcaactctaaagccagaaaatattattaattcaccttacctccaagaattggcattgatatgaaaacttattactgatttaaaaacaaatagcttccctggtatttgtttttgtctgcaaaactcaagttctgcgatactcaaggcatacatgaatacctagagtgttgcccgatcacttacttacttcattacactgacctcttttagggtgtccaccagtgacaggcatatttcttatggttaagcattggtcacaacagtttacatgcaaacttggtttgtttttgaaatagatggcatttagccgaaagtctagtctatgtggtgtaccgttagtcagcatgtgctggcgtaaatgtcattccgtgggaaaagagcacccccaggcaggactatgatgtggcttgaaacatccctcaaagatctgggctggccacattgctttatgtgcagatggagagaggagacaaaaaaaaggaacttccgtcttgctctggattttttaaaacttgtacaatgacagaaggagaagagatgtaaattcaaggacactggttgtccttgaatttctcggaccattctttatccttgccacagactcctccctctctgcctgtccagaagtgaaggtcccacaggcttccttgagcagtaggctggtcatcccatgctccacactttccctggacactaagaaaatccccagcatcaatctctaagcagagctctccctgggtctaagctccctctccgatggctccctgaacacttccacccacacgttcagcggggactccagacatagcattgtcagaatcaaactcagccttcttgcctaacctactgtttcccaggttttccgtcttagctggagacgcctccatttaacccctgcaggaaagctgagaatctctaccatcagccctcttcatcatagctcatgtccattagtcactgaatactccatgagctctctcctaaaatatcctccaatcagctcccccctctgccctcccacctttactctcctaggttaggctgtccatgtcttttgctttactcttaggcaccagcccacattcttgtgtacattgcagccagcaatgcttctacatagcaaatctgaccagggcctttccctgttgaaaaatccttcagtggctccctaaactcatgctcacatacaaaattcatattcataccttgaccttttttttttttttgtagatatggggtcttgctaagttgcccaggctgatctcaaactcctgggctcaagagatcctcccacctcagcctcccaaagtgctgggattataggcatgagccatcatgccgcaccccctcgttgacttttaaggccctcttgaactttgtctttggcccttccttcctgtcactgaaactctttctttcttattcattttctttcccatatttcctatgtttgtgtcaatatatcaaattagaaaaagcaactgactaggaaaaaaatgaagcctatttgattgaggtgattccagatgtgaaatgaagcttggcgaacaccagctcctctacaggtggggctttaataattacgaagcaagaaggatgcacatatatcaatcaatgcgcacgcagcacactgccaacctcacccctccttgcacacgtcaatacaggctcaggcttggtagcaggtactacaagttccacatgtgaaaaacacaaagcaagaaaatcgccacctcctgccctgccttccatggggagcctgtttggagtgtaggggcgcacccactctaagtcatgtctcaggctggcctgtagccttgcccttggtttccctgttgaacacagccttgtgcaccatttcccccgctaaagagctcaccggggacacagtccttactgtcttcatccgctgtgaaatcataaacggctccactaaacaagttagcatctgattgtttcttctcaggttgccagaaaaaaaaaacaaaaacctggatatttggacacctctgggagcaattgagttgtccgctttgcatgcaggcatttggcatgtgaaggtacagcctgaaggacaagagctgcctccttcatgtctgtgtccttgttgcctagcatgggagctggcagagaaaacgtctgaaaatacttgagaaggggcttttagaaatgaacaacccggctctatcccatgaagaggagcgtagtggaccatccagatccttcaaggcttggcttccaagtccttctctgaatacagactctgttcttactgcctctgagatccactcgagccatcccaagtggtgggatgagctgtgttccctacccccttagacctctatcctattgtttctgccacccctactctccagcatgctgttccacaccagaccttagagtctgctttatctaccaacaaccctagaaaacaggtgtaatttgttgacccagacatggcctgggctggggattttactctatgaccacatagcaccaaacatctggaacagaaagggaaaaagctctccagctgtttccagacatccagatgtctggcatgggaaagaggaacatcctgccacctgccccactgagggtatgctgtccaagcagacaggcagcaggtcaccgggccatggggccagcctctgtggtgcagggctgccactctgtctctgtgcaagatgagacttgacctgaaacctccagactgaaagacccctctttctgaagttttctttagaaaaaaaagtggcagaagccacagtaggttcatggggaaccccactcacaccagacgtaatggcgtcttttatttgtaggtatcaaaaagtgtggccagttcaagatttccctccctgctttcagtttccagggcacatggtttaaccaaaatcatgttaaaaacttcagtgtcttctgggtttaactcagttcccccagacaattttcttcttttcctttcaagggagcatttggctttccacctggtcatccttcaaaacattcattcaacacacacacacacacacacacacacacacacacacacacacacatatactttttttttttttcagagggtgtctcactctgtcactcaggctggagtgcagtggcgcgatctctcctcactgcaagctccgcctcctgggttcacgccattctcctgcctcagcctcctgaatagctgggactacaggcgcccgccaccacacccacctggctaaatttttttttgtatttttttagtagagacagggtttcaccgtgttagccaggatagtcttgatctcctggcctcgtgatccacctgcctcggcctcccaaagtgctgcgattacaggcgtgagccaccgcgcctggcctcaacatatattttttaagtgcttacgtgtcaggcattgtaagaatagtattaatatattgtacccttaatgaatataatgacaattttgactaaacaataatcacattaaagatgatgataataattgaaattacatattgaccatttatgtacctcactgaataatctcatttgtatttctttacttaatttatcaaaccacactaaaaataaatgcattacttttaatggcaaaaaacgaaattacttttacaccaacctaatatctcctaggaagctcagagtgattaaatacctcacagaaagccacacagcatattgatagtctagctcaaacttgaatgcaagtctgcctggagttcagcaatcacacccttactcactgcattatatcaatgcacatctgtacagtgcacgtggcagagaggaaccagggtaggtataatgagtttgtaactccagagagcaccattgtattccatgagactggcactggctagagcacagtgtacagcctacacggtgaatgactccccatggagttgtgagacacagtggccctgtcctgtgttcacttacaggcaccagaagcatgggaggaaataaaatcccatgcttatgtatatgtgcatatatcatatatgtctatgtgcaggtatggagtgtctagtatgaaggctggcatctagtaggtgctcttagatctttgctgtttgcctatttaaataaaaacattttaaaatgtaaatagagaaggcagatgccgagactggaggaggaagtaagagttacgccctgttgtgggtagcaggcaggggctggagggagagtctgggaacagccaagggataaaagctgtgatgatgggcggggtctgagtgtgtagaattgggcctaagatggctctcagagggaggaagagacctgggtctgcagcagcaattagaactgtttctggggttcacctcacttgctgccttagtatgagaactaggtttcctttgacagcctgtttcttgggtggtccacttttgactcggagggctcatcagagggaaaggaaggatgcctattcctctggtgcctggtcctctcagccagtgtcctctgcacctgccccagagggctctgacacaggcctggtggagattgagagctcaacatggggccaggtgaaggcaaaattccccaggttcttaggcaagatttgattcagatctgtggctgtgaagccaggccttttgcccttaaccagaagtctccagacaatggatttgcagccatgactcatagaaccctgtccccactctcaccagcagaggcttggctctgggaaagatggttcaggactctggacctcaggagtcccatttagaaaagaatcaagagagtgagatgtttgctcagctgccttttccctccagagagggacactgcatgtgtcccgccactgctaggctgaaggaggagaagagcgaatgagctctgtgttcacagcacatcttcttacccagcctctctggacatcccaggaatggggggcttagcttctggtttgtgacaaggggaggatgccttcattatcccctaatcctgtctccgtggcccggcagcctgactgacaaagcatcctgcctggcactgtggcaactgccatcgaagcctgaccagctggagcccaggcgatagtttttcgaaagctgttacccaaaaaaagcaacactgagttgggtgtagagataactatctctgctgtcacaccacacggggagggagggtagcgacaataccacctccttcctcgacaacgataccttacggaagccagagaaatttaggcattgaaagtaaaaacattcagcgtacttaccaaatgttgactgactccccgtgagcattttttcagcagagagctgagggaaacaactttttcttgttttctctccacgccatcccacagctgacacagcttggagaaagaacacacacccatagactgcaaacacttctcaggtggctgtgaaccctctcggggcctcaggcactacaaggtgccctccctgacctcctgggtatgaaacacagaggaatctagggctgagtgattgtgtgctaccaaagagaaagagagaggaagcaaagccacaatttggatcgtcctgtggctgccgcggccacagccatccaaccagcagctcgcctggcagtgcctactggcaatgggctctctctgtctctctctccctttctgtggctctttcttgttttctctctccctctctctctctcctttcttgggggctgtattggttctggagaaggaggcccctgccattgcttctgacattgcacaggaaaggaagagtaaaaatgctattgagaaagacctggtttttctgtttttcctggagggattcctccctcgcaaagggagtggattagaaatgatggaataattcgaaggccacaagtggacaggtggagccaacacccctccacacacctggtcagtccattttctgccctcgttctctcctccccgtcatgatgttgtgctccgccctttatctccttttttttggttgtcacagtttcagctcattgtcacttgtgaggaaagtagaaaccatccactgtatctggtgtaaaacagcctcaaacctttttgagaaaagcaggatacaaatgaatcaatgtgccaagcagtgcccttgggggcgtgggacctgggtccagtgatcccagatggtggccttcccccaggagagagaacagcactgtctctcctcccctcgcactacagtttgggtcactgccatcacggatgccttctcaaaacatatctttgaccccttcttccttctctgtggttgccaagctgacccatcccttgctcctcagccatcttcctttctaaagttcacgaatttgtgttttccacccccttcccttctctaccaccccagggccgtcgtccactttgcttggatactgacagagcctccttgccaacattcctcctttctccccaaactgatgacaggtgaagatttccccaaacagcaatttatttaatatcatccctgcaggaatatcttccttggctgcccatgggctgcaggataaagtccaaatacctagtctcagcaaacagaaacttctacatcttgaccctaacttactgttcaaagcattaatcataatagatattttcaaagctaccatttatgatttatgggccacttagtacacatcagatacagcgttaagcattgcttcctgagttagttctcacaagagtcctacatgaagtttcattacttgcactttccattttcaggcctgtagagatgaagcagcttcagaaggctgacagtgggtcagtggtcagtggtgagcattggactgcagatcttatgatgtcaaaacccatgctcttgaccccttcactgccccttctacctgaacggatgccctgtgctgctgtcacacccctcccccgaccctccacacaggtcctgggctgtcatggtcaccccctcccaaacccaaactggtgcctggggcagaggagctctaagaagtcctcaatccatatgagctgaaagttctcagccttcaaagtagaagatcgggtggataaagaagacacgcagcccaggaagcttcaagtagatgggcagtgagtgccagcccgccacatctgctgagtgagagtgggtggtggaagagctggggctggctgtattcatttgaaacgtgggctctttctctgcatcctgcagcagcctctttctctgtccacccttctcgttcacccaccacacccctcgtgaaactccattcctaaggtaattctccaaatgtccaaacccaagatctactcagccaagaagctgggttctgccgctctccctccccctgctgttctgctgcaaggaaatggaagaaggaacaacctcgctgggccacttggtgatttgttttttccttgctcaaagcacaaacatgcacaaatctcagagtccccatgttaagcagagacgctccctggtcagtctcctgcactctaacttcctaaaaattaaagagtcaaggcagaatcagacacggtagaagggagaaaaggcctcttagtagccataaagtccaggtacctcattttacaggtgaggacatcggagcctggagagaaataacttgtccaaggtcattcagtatcagagtggtagagcccacacagttcccaaggccttttctcccaggcggagagctctttccctctccctgtgatgtggctgctgcagccacacaaaccaactgttcttgttacacgtgtcatggtcaaatgtccactagctgcccaagggcaagatgagttacaagagcaattcttcccatgactttacagttgtcaggaggggtcaaggacgctttcaagattcacactctgaccgtggcaagccaggttctcggagggttaaatgactgatgaaaagaaagccaaaggctgagtcagaaccagggacagaacggctggcacagccctgtcttgctggggaaggcaaagttctccattttggcaaggtccgtgaatgtctctttttgcttttcctgggtctctggtgcacttgttggattgaatcttaaagcataccctgaatgctaaacatctcaggataatgcactaagtccttcctcagctgggctggcccatctttctacagcctcaccctaatatacctactctgctcagggcacaggaaacatagcccacactttcacatcttcatttactttttttttggttattctctccaccaggaatatcttcccctctttaactggcaaacctgcacttgactttgaggatggagtttaaatgcctgctccttttcatagcctcctctggctcttctctcctagtcccctcacttgtcttcccagagaactctgttcctggcacctctctgcccttcctgagttgaattctagctatttgttaacatgttttctcctatggctgtcctgaggctctctcaaggacagtgactcagtcatattcatctttgtaccctgggttgtcagctcagttactgggacacagagggaacaaaagaattactactttaaactacacagaaatgcatctacttaaggaaaactttgctccaagttcccaaatggaaaagccaatgaaggagttgttgttgttgttgttgtcgtttgcccctaagagtatagcaaaggcccccaaccagccagttttcattctgaatggtaaagtgtcattttacaagctgctgccacgagcaagcctccacgcatgtcgaatgcacacttgtatgcatgcacacacacataggagctagaaggagctggttgctctatggcaagaagcagcaaagaagataagatcaccatactgcaaaggaaggtaagccacgtgatgatgtgggtaaccccaggcacagatgataccctcagcgaggcccagcttaaatctaaccacatcaacttttcatgaaacagacatgaaaaagtaagactaagacaattacaaaaaaggtggtttaatgccttcttgcctcgatggtatcaaagctattggctccagggctacacttggggaaacaattctttgagataaggagatgaactatctgctcaaaagaatgtgcaggaagccaaggtaactgggcaacacataatgaaacggtttgtggccaatgagccgtctaaacaaaaatatccctggtaggcatcagttgtataagtgaaggaaaccaaacccacccttgtttcaaagtgaagactttgtgggtgccagtgtgtgagtgtgtgtgtgtgtgtcctcactaaatattatagttaaagtgaaattcacaagtcctccagctgtggctgacactggtataaaatgaaaaggttgagaaggtgagactagttgtcatacagcaaccttgaagtgcctttccgggtggcactgcctgctatgtgaaggctcatttgctgaatgaccatcactacgtcaacacaaattgagatctcagcattgatttatcggtgtgtgtcccagaaagacacactgcatttcagcatcacggtattctgatgtagttaggttctgaattctctgagccacagacgatggtatgtttctcctctctgaagctctgctaatgcctcgtccctatttccctgaaatatggtttcccccatcagttttcaaccttttcgtttccccaggcaatcttttgatgattctttaaggtccccagatccacagaatgtgacagctgggatgagcttccgggggtgccgattggaagctttacaggctctaaaacttgctactgaatctcagctctggcattagtcggtgttctttgatttcaggtaagtcacacaacctaaatctcagctttctcatttataaattgggactaacagaacccatcttctagttgagtttgctttagaaatatatgagttaattcgcattaaagtacttagcacaattatacacctcagtatgtgaagccatttttttgtttgcttgtttgagatggagtcttgctctgtcgcccaggctgcagtgcagtggtgcgatctccgctcactgcaacctccgcctcccgggttcacaccattctcctacctcagcttcccgagtagcagggactacaggtgcctgccaccacacccggctaatttttgtatttttagtagagacggggtttcaccttgttagccaggatggtctcaatctcctgacctcgtgatccgctcccctcgggctcccaaagtgctgggattacaggcgtgagccaccgcgcccagctgtgaagctatttttattaccaccaccagcatgatcccttcagaccctcttaatcttgaggtccagagagataaagtaacttgtcctagggaaatgaatcttggttgagacaataactattgtctctgctatacaatgattaaaccaaagatagcagcaatcgtaagtggctgtcagggctcaggtctactcgcttccaggtcagaaccacattggtgcccgtactgtgatttatcattgcatacttatttttttcagagtgtagcacttgataggtactgtataaatatttattaatcagctgattgcaaagatcactgctgattttcaaagcaacaggtttctctatcgtaactgcttctcctccacactatcacgtccttataatttcagaacacccatctaggaaggactcatactaatgtgttatcagagggaaacattccacccctttttggaatgcagatatagattgctccagatttcaggaacactaattagagccactggtaatttgactgaagcgctaaagcaccaaagcactcacagaaggcacctttgtactcacacattagagcttttgtcactacatatcaaaaatggtcaagctgccttttgatggtacccgcaggctggatgacagggtcaagatgccagcccaccaaatccatcatcggaaagaaactcggggccagcccatctcctaaaagctgagtatgttgcacagattgctggttctaaataggatattctaataaacattgctattgtttttattgtcttgtgcagtatcgaatatgcttctcacatactagactttatgcaaaaccaccatgacctaaatgtttaattcagatctttattttctgtttcataaccccttttaatatcactgtaaaaatctaaatggatatacatgatgctcttttggtaccaagctttttgggctatacttttatggttaatatcagggtcacagcaagagctcaagagagcatgggtatagcttaaaagtgcctggaatatacttcttgtcctagcaattgataccctctcattgcttcattgaatttttcctgttcttaacctctgcccttgttttcagtaatattagtataatgagttgaataaatggccctatctataaagaaatgggaaaaaaatcgggctttggctgaaactcccttgaggattaaaggtataagggtgaacgcagaggtgaacttagatatctatgaaataaacagagacagggtgtttctcggaggttgcagccaggcaagagtctaatcagagtctgtggctgaacctcatcagcttcaccagaggacacatcctttctagaatctcctgttccatcccctacttcctgtggcctactcagaacctctggaattggggatggctgatgggagtgacaggtggcccatatgttccgtgacaatgcactgttcattgcttttctgaacacctttgagtagactttgcactggattctgagaacagtgcctagacatgtactatccaaaagtagccaccaaccatatgtagctgtcgagcacttgaaatatggccagtccaaattgaggtatgcttcaagcataaaacccacactagatattgaagatgtggtacaaaaatgaatataaaatatcgtattaataagttttccatattgataccacgttgaaatgataatactttggatagattgggtaaagataaaatgttttattaaggttaatttcagctgtttccttttacttcttaacatgtggctactagaacatctaaactgacaaatctgattacattgtatttctaccagacagcactgctctaaacaactgccagagaaactgtcttcatccatgtacaagttagcccagtgagaacacaactctccagccctctgcccacgttccactgcactcagaatgaaatctgcgctccttctctggctcccgcaatgcagagggacctgggccctgcctccccctccagcccccgcttgctgctcacttcagtcatgctggcattttcctcagaatctgcaggcttctgccaggtccaggatctttgcagcctgtccccctcatctgtttttgtcgtgtgggtctcctctcaagtggcagctcctgggagaagccttccctcacctcctgtggtaggaagaataatggcccccaaagatgtcacctcctaatccctggaacctgtgaatatgctaccttacatggcaaaagagactcaaaggaggaagaattttgagatggggagatgatcctgggttatccatgtgggccccatatgatcacaagagtcctcataagggaaaaagagggaggaaggggagtcagagagggaggtgtgatgacagaagcagaaattggagagatgcagggccatgagccaaggaatgcaggtggcttccaggagctggaaaagcccaagatacgattcttccctgaagccttcagaaggaatgcaggactccaacctgtgttagtcctttctcacattgctacagagaactacctgacactgcgtaatttataaagagagggggtttaattggctcatggttccacaggctgtacatgaagcatggctggggaggcctcaggaaacttacgatcatggcaaaaggtgaaggggaagcaggtacgtcttacgtggtggagcaggagagagagagagtgaagggggagatgccacacacttttaaacaaccagatctcatgagaactcactcactatcgtgagaatagcaagagggaaatccactcataatctgttcacctcccactaggcccctactccaacaaagggggttatcattcagcatgagatttggaccgggacataaatccaaaccatatcacaaccaattttagacttgtgacctctaggacaatgacagaatacattcatattgttctaagccaaaacatttgtggttatttgttatagcagcaataggaaatcaatatacctcccaacctgagactgtgccccacccatgccccagctcctctattccatccttctgggttcttctttttgtatcctttgctgctatcagactgtttctaatttctttgtggatttgtttacttgtgtattttctgtctctcctgactagaatgtgagctcccctagggcagagacctcctatgttatgattacctctgagtactcttgcctttgaactaatgcctgacacatagcaaatgctcactggtataaataaatggttgaatgaagaaaggcatgacagacaagtagctctttgaaacattcacttatagccaattggatatcatctgaaaacttttagggaaaaagtacaccccaaatattaatagatgaaacggacaacattgacagatacagatattggacaatacttgctatttacgaggtaccatgatgatgctgtggagatacaaataacttgatgatcctcctacagtctccactgagagacaagcatgggcacatcataaaacatggccaaagtatggttttaattgttggggccaaacgagtggtggggctttaggtatgagcagtgatgtgctgataaaccagcctgcaaaacaacagcgaagataagggtctgatttgcaatgtttgccaatttctgtggtgtaaatattcctacagtgattgatttcaagctaccattgcgatgtctctgaatgtggagctgggaagaaacatgtacacaaggatggttttgttgaggaggtgggatttcagttgggcccatcagggttggtgggatgtggatggcctgagaatagaggaggaggcatcttgcacacaaagggaagaatctcttcagggctagtgaggtgcgtctcaaaggcccctgtggctccagtgggtttcctgtcattgagagaaacagaaatgagcaactaatgagacgtcatcatgaagaggactccctggaaagatgcaggagcagggaagacatagataattttccagccctgtggtcattttaacaagcatggcggtatagctaacgcacaggctgccaaatcccagggaggagaatcaacagtccgtgttcatggagctggtcccaagaaatccagacctgaatccaggctgatgccctcactcattctgcctctcacatgtttagggtcgaaataacatgcagctcctccagcccaaagatgagccagcaagggaacttagaacaaccctctttggaacagttctcaaagtatacctccctgaaattcccctcctcatccatgactcaacccctctaatttgcaggcatgggaggtttgattctgaggatattaaggtagtgtttaagatgctggtgtgatgtttaagcggggggtcagatggtacccgattcaaatcctgactccacatgactcctggggaggttacttgacctctctagactttgggttcctcatctctaaaatggggataataatgatatcctcctgagagggtttggagcagattatatgatgcctaagagacaccctctcctgtgcctggtgcatggtaagtgcccaattcatgtgcacattgatggtgatgatcatgttttccccctcttaaggccttgccagacagagcagagctggtttccagcaagcccctttcccatccatagtcacctgcccatcaacttgctctgagcagggagccctgtagacaactggtgcagcatcctcccagcccacgtcttccctgctgatcactttaagagcatgcattcttctgtgttcagggtgagatgttttccttgctttgggaatgtttcaatgaaagacaaggataaggccattacgtgaacacagggacaacaacgaaaacaagactgctttctgaaaagcaccaaaaagccttattttgcctgaatggccattattttcattctttttccctcacacaaagcaccggagcacatttcattcagtctgttgctgagtgagtgggtgtgaagatgcagtacaaacaaaagtggtaacatattgctgttgtcaggactcttgttaagcgctttgcgaggtggaccaagcttccctgctagcaccaccgcttgagtcatcaggagcaacgatgtacatatacacacataaatagaaaaaccctccataatccttgacatggctacacggcaatttatgagcaggagctggatttcaaaagtctgcagaacataaaagcacaattttcttctaagatgacagcaccttgtcagccgcttccacaatcttatgtgtggatcctgccaccttggagatgcagttccttctgtgcaagaaggcaaaactgctccattcctctgacacattagggcccctgggtgtgagcgtgaaaggcctcaacggggttgcatgtgttggcagccaggtgcctggagagtggggaggacatgtgaggtcccagggtgctggggtgttctaggtcccaggctatccaaatcataccactcaaagtaggagaaaacctgctacctcctactctgagtttgctgaaaataaaaagcaattttgaataggggaaggaggtaaaccttggcacttgcttccttttgccatgtaaatcttggcatttaccataaactgtcctttcttaaagacaattctgtggctttggtttatggcaatattatatgtgtgtgtgtgtgtgtgagagagagtgtgtgtgtgtatgagtgagtgggtgggtgagagagagagagagattttttttttttccccacaatagttttcttcctccagcttttgtcaaaaagcttactctaccaatgacgtaagttctgagaacttttcttccggatcactggatggttctgaggaagtaggaagtgtgtgctgataatgtctcagctccctgaagggcaggattccccggccatgttccccatcaagtctccaaggtatccatgtgtgcccacattgtaaagtatttactgagcgagctggggaacaagcaacactattgtgactttttccaatttcacaatccctgacaggccctgtcagagggatccctgccccgatggcacaccagcgcttgaacctcagtgcagggcctgtccctatgtgattcagccagaagagcatcatgtttaaggacaccatcatgggtgttcttattgaataccaacgatgtgtctggcgtggtcgggtgggtgacacaagggtaaggtagtccatgtttggaggcttataggagctaacatcatacatgctttgagcctcttcccacctttccccaacccatgtccaggggttggcatcctgccttggtatgggccagctgcacagctgtgcgtgatgcttggcaagtttgtaatgttcacagtgcctataagctccagtcccgtgtctataaagtgaggataacaactcctaagttgcaggtttgttgtaaggattaaatgaaactatatacataaaatacctaccataggtcctggcacaccgtaggtgcttatgaaattttcatagtcagcttcgctttgacaagtagtgaaaaaaagctatctgaggaaacaagatgaacatacagaaagcaacctgggaatattttatagttagcaaataataaagaactaagtagaataaataatgagacctttagaataggctcaagctgtctgcagcctggaagggaaatgaaggatgtggggtgagtctgcagcaaacagtatcatcaaggacaaggactggagatggagcttgaagagatggcctaaatggctgtggttcctctcggatgacaagatttctggtgcaataaataatgtcatttgaaaaaaaaaaattcaagtgcctgattcatctcatgggatcatgggagtaaaatgaatatgagaaggaaacatgggctggtccaggtgggacaaaggccctcttctgctgacagcatctccccctgaaagattgccggtaatatcctttgtgtctgtcgctgtggcaattagtaatgacccccagcttggcattgagagcattcctttataacgagagccagccagacacaatctctctgctcagagttcagggcggagggggagaaccaggcagatccacacggtacacgcttccaattaaaaatacaaacagaggcaaagcaaaatgaatgtcacagaaaagaaagtgctgccacccactcttggcctaaaggtcactgtgccacagccttggccattatctgcagccgcaaaggtcaggggggctgtctgcattgctggggagtatgtaggctttcataaggtctcaaaatgactgttgctctgacaccaaaattagtgataagctctcagcagaagacgataatagagaaatggagtgactgtaaccttttccgccatctctcttgtcggttccatgaagcagagtcacaaggcataaaacgagaagtttccacattctacaaaagactacaagattgctgacttaattgggtgcgtaacaaatggctataccactgccaacaagaagacatcaaaaaggaaggagaaaatagcgattaaaacatctcatgacaaccctttgaatttggaaactggctccagatatacctggacaggccttgatacaagtgcagggagctagccatgtggttccattaatattccaatcattgtggcccagcaagggcaaccatgccactaactaatttgttgaatttcaggagaatttaaatataggaagaactggaagaacactggacttggagtcagatagacctgcattcaaatctcaattgttgtccctatttgatggacaatattataaaatcttttaccatccttgtactgtaattccgcaatgttttcatctggaaatttaatgactttaatacctactgcacaaggtcccagtaaagattaaatgtgaggaaaaacaccggaaaagttcttagtaaatgatcaggtacagtggggcgtggtggcttactcctgtaatcccagaactttgggaggccaaggcaggtggatcacgaggtgaagagatcgagaccatcctgaccaacatggtgaaaccccatctccactaaaaatacaaaaattagctgggcatggtggtgcgcatctgtaggcccagctacttgggaggctgaggctggagaatcgcttgaacccaggaggcagagattgcagtgagccaagattgcaccactgcactccagcctggcgacagcgagactccatctcaaataaataaataaataaataaaaataaatgatcaggtacaatacaaatacaaacatagttcgaattcaaatacaaaaataacttgaatcattattattattagctagtaatatcatccattatccctgagaaaatctctactcctatccactctgaggtaacgttgtttttctgtatttaggccatccagggagaaaaatttttgctgttgatgataaacagaatctgcaaaatgctacatgcagaactatttcgttgggttgatatataaaacactaaaggaaataaaccaaggcacacagcacacacatgaacatatggctgaatatggcctttagtaggtatcagaaacaaaattagcaacttgtagcacttcagctaagcttcctagcaacagaaatacataaataacaaatacttatgatgattatccctaaaagtcactggaatattagcatgtgatattggtccctccaagtgttctctagctcaaggcaattggcatttttcaattacttaggtaataaagtatttgatgtttaaacctgccaaacatcgaggacgaggcatgaatgatactttggcagtttaaagtattggcctccttcctttccagaaggaaatcaatcattgaatcaccactactccaaactcagaatcgcccaacatagcaatgtgggttttccttctaaagttctgtgcctgtccctgttaaacaggtctggagaagatgctggtagtcattttgagcatcgcacagtaactgaaaggagctgacaggctcagaggctgggcagagcttacgattgtgcttgtctgtgtggctgaccacatgggggatgctctcggcactgtttgctttattagcccgcatataacttcttgggagacacagccaatttggtaagatgtgggagaaatctgtactttaaagtttcctggaacactgggtatcaaaggaatgagacgtctcctggcctttcatgttgcaaactagatggagagacacagcttagcagaacagctaaagcttaggatcaacttttacagtaacatggaaaccacatgacagattgtataggcgcctgcataacttctgactcactccccaggtgcttctgttctctatagctacacagagccatgttgaggagacaagaccagagcagtattattccacttggtgaaactggtcatatttagtcatacacttatgagggaggacaacagcagaattagaggcagtgtctgagtttactctgcctttgtgcaggtaaaatgtgactcagataccagagggtgaatgtgtggacccttacactttattatttattctcttgcagtgtttgcttttatttatttatttatttatttaatgaaactaagtctcgctctgtcgcccaggctggattttgcggtggtgcaatctcagctcactgcagcctccgcctcccggatttaagcgattctcctgcctcagcctcctgagtagctgcacaggcgcccgccaccactcccggctaatttttgtattttcagtagagacggggtttcaccacgttagccaggctggtctcgaactcctgacaacgtgatccatccacctcggcctcccaaagtgctgggattacaggtgtgagccatcgcacccagccctgtttgcttatttttttaaaaagcatttatgcattaaattgaactaatattaaatacagtgtagatttctgggctaacctcatatatactgaatcaggaattgtgatgaaaggcctgggaatctaaactttcagcaacctcaagggatccttaaacccactcatgttaaatatggtggccctgctgatccatcctcaacaaccacatccctgaacagatctgaagatcatccctaccaactggggaaactgatgaagtggaaaaggaaaagttaaaagacaatgaaaagagctcaggtaaaactatcttcttggcatatttgaggccactattaagtggcatagaacgttttgcttctgaaggtggaaaccattcagatgccttccacaactcaatattttcttttcctctcaaccctcccccaagtaataacactgaatagagttcacctttccaggtctcttcctgtccaaccactcacctgttaagatttaaagcatggtagcagatctcctgaatagaatctcttggggtgaagaggtgagatccatcacgattttaaagaatcactgacctttttttttttttcttagaactagaagagtccttagatattatcaaaatatttacaagacaaagataagtcatcgatgcaaatgaattaatacttttacaacttgaaaaaaaatgtataacattttacatcatgcttgaatcaagggggaagaaagagtatgctgtagagtgtgaattcaggtgactcctggcaactgcatgtttaattcaaatagagcaagagagaaagtgctgcctcttttctggacagggaacgctgcctgaatgagaagagttttagctgacatttcagaggtggaacctggactgtcagaagcatgtgttggtaaggacagagagggagaaggggtgctattctggggacaaattagtttaggagaaggctcagaagagagattcaccaattgggtaaaccttgagtctatcaaaagaggaaggatgaggaataatgggagaatgtcagaaagacaaaggaaactcttgttcctaatctgtgcgtagaacactggaaggatgagcacagaggaagccatcgttgcttcattcattcctccactcttcattcaataaacgtctagtgggagagcatccagggatgaatgatacttagttggcacctataaggaccttgcaggctcgtgggccagccagaaaaataatgagagacattttcattatggtgggacaagggctatgatgaatagttgaggggcacatgggtgaagtataaatgcagacagaacatgttagggaaagctttccagataacatggcacttcccagggcttgaagagaaacaatgaacagagatctgaaccccagggggagctacccggcaagtcaagttcccacgaagaagcccgagactgaaatgatctttgctcatgcaccccaaatggaagtaaatgtatcagatgttgagtctttgccctctccaccttgaacaccccatccacacaacacaacatgccaggctttggaatgaaaccagcagtgtacactcagccaaagtgactgatgttgctttccgggtatttgtagctgaaggtatgcctactcctttcccatacaaacagaggaactcagctggcatcaagactcagcctcaaagcatccagccaagcagaaggcctacctggctgccgcacacgccctgcaaaatggcacacaggtgctatcatccagctagcagcttcagccgtgtaaccaactccagagtgttgacagctgcagtaaaactcacttggagttcaacataattaagcaaaatgattagtaccgaagagaagctggcaacaaagaactttggtttctgaggcaaaattataggatcccaggatattagagctggaaggaggtcttacagatcacagccagccacctccatttcacagatgagaaagtcaggccaagagaggtgaactgaagggctgaggatgacagaagaagctacacagtatcagggtaagagtgaggactctgagatcggtcacactggggtttgcaacccaagtttggaactcactgacttcaggacagcaccttggtctctctaagcctcagtttcctttctgaagtttgtgttgctatgaggattaattgaaggttattgcagggcctgttgcccatggccagtatataacgttactatggagagtcagaacacggggtccatggccttgcttcaccatgtatgagctgtgtttccctgggtctcagttcttgtacttatgaaatggaaataaagatgctagtacctgccctaattatttgccaggataggtggaaggcttgtgggtgagagctgtgtacacttctaagcaagtttttgttattactattcccattatggcaaaaacacgttctgggtctttctactggtaagtggcagggccaagacaggacacatgcagtgaagaaaaaagaccagggacattttctcccaggcaactgatggactgcaatgtttggactcacccagtatggttcagaaggtctgatgggtcagtgatgagctcaggcgggagaagaaatctgcagtgtattcaatgccaaagggtctcatttctgggtgggagggacagcggggatggggtgaagcaggggtgggcagcaggaaggagaggaaagaacctggggaaatcaaaccacctgcctgggtttcactctgagttttcagattcattaaaaagaaagaaaatacacacacacacacacacacacacacacacacaaaagcacaaagcaaaacctcagtttggtcaatccacaaaaaatgaaagacagggctgcaaaaagtgctgagaatgggattgctcgacttttcacagcttcagctggcttacaataccctcagcttggtgcttctcccgaatccacatctcaaacgctctaattagattgtgcagccgaaagaaggcccggtgcccttggaaataagtgattgcttacttgccacaggaatgttctgtgctttcataggcttcatctttttttttttttttcctgggggcttgggaatgaattgggcaatttcttaggtgtctgctccacagaaagacgttgagcttacatttggtttctctttttacctaggttcttgcctctgcctgaaatactcttggtctggcttccttacttgctcacctgctcacctctaagacccagttcagggctcccacaggatccatccacctaaatccttaccaggggtgcctgtggaatggttactgtttacctgtcttcccaccaagagatgatcccctaaggacaatggctttgtcgtcttcatctgttcacctttgtgttccctatatttggcatggcgctttgcacctggggccttgcaactcaaagtgtggcttatggcttagcagcatcagcctcacctgggaccttgggaccttgggaccttgggaccttgtgagaagtacagagatctcgagctccaccccagacttactgaatctgaattttctttgccttttttttttttttttttgagacagggtcttgctctgtcatccaggctggagtgcagtggcacaatcatagctcattgcagtctcttcgtgggactgcccaagagattgtcccatctcagcctggtgagactatagcaacacgacacccgggttttttttctttctttctttctttctttcttttttttttttttttagagatgggggtctcactttcttgtctaggctgtaaattttcagtttaacaagtttcttatgtgatttgtggccacactgaagactcaccagaacagggtggggtggggaatacttaatcaatatttgtggaatttacccgatgaaatccagttattcctgctgaatttctctctcctccaggaggacatagcaaacgagctgaggaaggtgaatgctgcaaccctctctcctcagccctgcagccgatccctgacataaactccttgaagttcagtggcctctttccatgcacctaccacctacacctgctgctttcaaagaaaccacaacctggaccgggaacagaactggacgtgccaaaatgcctgaggacacttcatcgaatgtggctggcttgatgggaagctggcatgactagaaatgtcaggagtcttccctctcgaggtttcaagctttgtgtttctgactcaatggtccggattgagatcagatgagtcaagttcagatgaccatgcaaacctttagatggggcctaaaaccaaatctgtgttctcaaaccattccaaatgtgttcatcaccagttatagtttaccataccacccaatccaagagagtgcagtcatttctctaatagcagatgcataattttctcatcaatggaaaatctaagtgtacatcacaaggtcaaaagttgcgagaaacttgacaccttcgagattgtgccaaacctcaagcttgcagtaataagggctctcagtcaaaccttctgagaatgaagtgtatttgacccaacgtttagcataagcaagcacgtactatgctgtccctttacgatggctgaattcttggctagactatgaaggaacacaacagcctaagcaaagcctatataaaacatcaacccacggtcatggcccaatgagatatagagatattgttgaaatccaagaaagtgaaacaaaaatcctgagccttattcgctaaattcccttaattgtgacacactaaacaagtaacagtcattagttctagtatcatgtaagtacaacattctaaaatggctactacagatatcaaaagcattaattcaatgtacacttactgggcacccactgtgtgctaggggaagtgtgctagggtaatggagattcaccatggaacttccttttattttccctcactgcctttctcttttcaaatatttaatgaccatccactgcgtcccagaagttgccaggcctggggcaggagattctctctccttaaggcccctgtgtcccagctgggagtgacagatacatcaaccaataaataacatggtgggaaaagtccattaataatgatgtgcacacagtccttaggggtatccttgaccatcatgctccagcttagatctctgaaaacgaccttttggctgttactgaggatgtcagcaataaaactggatcctaaagaaaccattcatgatgatatatccttattggaattgacaatgcatgaggaaatcacacatgtaggtcccaactgataaagcattatccatccattaagttagacaggagaggtggcttaatgtcaataacatatctcagaaaaaaaatgtgcttatctcttgatttttgtagatcaaatcccactagaggaattgggtatgtttgtagacccaaccacttacattgataaggcagttttcaaagtgcttttataagtatttgctcattgggtcctcagagtaaccctggaggtagctggtggctcaccagtgtggcatggttgtgatgaggactactgtaccatgctcttcgtcaagcaaaaggcagacagtcactctccacctttttatagatagattgactgattgattgagatgagtctcactatgttgcccaggctggtcttcaactcctgggctcaagtgatctctctgccttagcctcacgagtacctgagactacaggtgcgagccaccatgcctggctcattcttcattttaaaagcataataaatactctttaaaaattccaaggaacgagatgtccctctaaactgccttcttcctcttcgtgtaatttgacattaagtgtcctggtgtgttaagcttgcctctatttaaatagccctgcagaaggccataccactcaggcttaaggggacagaaggtactctgtcctggaagcatcatgacactaaaagttcattaagatctctatcccagctattacactcctaaggtcactgggctctcctcaataggtatattaagcagcagcctcaaaaacagtcctcagttttaggatgcaaggaaaataattcacgaaggtgatcaactttaagttcaaattatattcactctagattttatcatggctcctgcccatgaatataccatcttccattcacatctaaggcaactagttcagggtgagaggaaatgggcactttatgaacatctgctatatacaaatctttacccacctttttcctcctttagaatttttctaactcagtggactctccatgattcaaaggaagtccttgattttcactccttctcacaaggttacctcttacaggtaacagtaccctcttgcctgcaaaggtcaggacaagaggatagaggaaaaagctaagggaatctcagaaccgtttatgtgctaaaattcttagcttagatgtatagatggacaaggaaaagtgggcaagagaaagtaaaactaaaatttaggcaaggaagccaattacccagtaaagagggaggctagcatcctagcatgagagtatcagaccagactatctcagacccttagtcttgtggatcaaggcactgatggagggcactgtagaaaagtgttgaaagcaatatggcagacactactggattggcaaattgcatccgctcctaccaaaggatcacactcccagaagctaaaggaaagaaatggagagtgggaggtgtattttgggtaaaaaagaaaaagaagcgcttgtatgaattttcatgttatttcagtgaagtcataatagaacagcttcccttcccagagcttgcccagaacagctatttaaagggggagtgagaactgtacaagctttgactagattctgaggtcggagccttaattagagtcacaattgtattgtacatctatttgtgtaactgttcaattaggagtgtaatagctgggacagagatcttaatgagcttttagtgtcatgatgcttcaagactgcccttttttggttgttgttattattaagctttcatataggggcttttcctctctgctgtccaactgtgtggttctcccttcaggcaggttgaaatgcaagactgagtcttgctatatctaaacttgggcattaaaaatgggctgtcttccccttatcatcttcatgattagcttgtaaacagtttcttgggtctatcctgttatcaacaaaaactctaggaatactggaatattagggccaatcttttacagttgagataattgagattcagaaagatgaagtgaactactggacacagcacagatagtgacagagcctgggcttgcacattagtgttctgacctttcaggaacaaaacaatcacaatgcctgtacatgtcataataaggtcattctaacactacaatgtacaccagtacccaaactggatcattcatttaaaaaaaattcattcccgaagacatagtttttgtggtcttaataggtattttacttaattttcctctgcctttcactacttagacttgggtacaattaaagatgatatttatattttgtgttatatagaatgaacagcactcaaacacattcttatttaagcaaatctggcctacgaaaagctgtattcatgaaccctcaccaaataaatggtgaggatggttttttgttttggctttagaaaatgattctctgccttaattccctcacatgtaaaataggcataatactgccatctaccttacaggattgttgggaagattaaatgaagtaatgcagttaaactgtttagtagactgtttcgcagagcttcaaactcagtcaatactagctgcttttgttcttattcttttcattatcacaaaagggtggccagaagattatgcatgccaactgtcagaatctttttttttttttttttgagacagagtctcgctctgtcgcccaggctggagtgcagtggcaccatctcagctcactgcaacctccgcctcccaggttcaagcaattcttcttcctcagcctcccaagaagctgagactacaggtgcgtgccactgtgcccagctagtttttgtatttttagtagagagggaatttcaccatattggccaggctggtcttgaactcctgacctcgtgatccgcctgccacagtctcccaaagtgctgggattataggcgtaagccactgtgcccagccctcagaatcattttttatattttgtaggaggaggcggacaactggggtggcatggtgggggtggtttaagtgttaatattttgagatgattaaaaaggaagagaaaatgaatgtcagagcttgtgaaaatgactgttgagacaaaacaattactctgttataaattaataatgcaattaacttatgatatgttattgagtgcttgaagaatggatagccctcaaatattctttttaaaacccatttattgcccaagataaacttaagggtagtgtcacattttgaaaaatgttattttattggccataatttttcacagtttcgatggggacttagtgacagcccaacacagcaaacgtcctttcatgttaccatccttgttttttttttttctttcttctaaagctaaattgtcctgggacactccaaatgtgatttatttgtcccaaggccagtagaagtttccatgtaggtgaaaatggatgtttggctagttgaagagaaacggaaatgagttctgcaagctgacttacccagtggaaatgggtaagtaactcaggaacattatatcactgtacattctgactataaggaattctggataattcatgtcccttatagatacatatgaacttacacatgatctatcaggaaggaagaagacaggagccccatgaagagggtgggcatctcagtgccaggcctttgtgctatgtgctttatttactcacttagtaattgcaacggtctagtgaagctttaggttccaaagtcacagagcaccaagtaacactaccactgggatttgttccacatttggtattgctagtattgtggagactttgttttaccttgcctcttcctttggggaacagtagtaggcatccacttttacaagaaagttgatgctgtgaagaggaaataagaggccagataaattcaaggtaaaattaatgaagatatgtttagatcctggttctcccattgcctggtccaacgttctttccaccacattccagtccttagggatgaggtagaaagagaaagatgtttgatagacctgataaaccctgaacagggctccctgtcagagaacttgggttccagtctagtctgtgaatttcactgcctgaaacctggctctttacttcctcacacctgtttcctcatctatcaaatggagaagttggtctagaagatctccaaggtccatttcagatctaacactctattattctattatctttgtgctctggtaagtagaagcatatagccctgggcttattaatattaactggggcaaacaagtgaaattagtttatgaaaatagagctgtggtttttgcttggagccaaatctgccttatgagactcactttaagcattggtaatgggattgctgatggctccttggccagaacctcaatgccctgctgttacactttccaggtggtgccaagggtgagcgtcctctgtagacacatgaaactgaggcattacacagtttaagtgaaaggaataaatcaaatcagttacattcagcctgactcatcttttgtctatcttttctcaatgcttgttcagtccagctcagtacgaaggccaacccttcctggaaacagccccttccagtcccagcctgcattgaatgggttgcttcacccaaccacagagagttcctactctctacactcataccatttatattttgggactcaggcctgtctatatgtctcaatagctgagagctataatgaagatcgttgtgtcaggggtaatgctttacgcctttgttcaggggagagatgggatattaaaattttttggcctagacaacttatcttcttttatttatatatttttacatgtgatattttgatacaaacatacaatatatagtgatcaaaatgcatcaccccaagcatttaccatttttctgtgttaggaacattccatttctcctcttttagttattttgaaatagacaataaattattattaactatagtcacccctattgtgccaatgaacattagatcctattccttctatctaactgtatttttgtacccactaaccatctcctctttatatccacctccccactattcttcccagcctctggtagccattattctactctccatctgcatgagttcaagatttgttttagctcccacatattaaatatttgtctttctgcacctggcttagttcactcaacataatgtcctccagttccaagtgattttgtgatttataacaagacatatatatttggtcttcatccatttctgttactgagttcctaaaacccttggaatttcagaagggataagagaatgaaggcaaaatcatcatcttttattgttcataacatacccttttcaattacacctgcgtttatattaatgactgccctttaggaagctcctaagcatggggggctggttgccagaggaacaaactgtgtgattgggactctcagccccactctccagacctctagggaggagagaggggctggagtttaaattagtcaccagtggccaatcatgcctacatgacaaagctgccataaaacccaaaaggacagggttcagggagattccaggttgctgaagacatagaggtgctgggagggtggcatgcccatcccctatatcttgtcttatgcatcttttccatctgggtgttcctgagttgtatcttatctttatctatctatctatctatctatctatctatctacctacctacctatctacctatctagtttcgagtcagaatcttgctctgtcatccaggctggagggcagtggtgcgatcttggctcactgtaaccactgcctgcagggctcaagcgattctcatgcctcagcctcccgggtagctgggactacagctgtgagccaccatgcccggctaatttttgtatttttagtagagacggggtttcgccatgtttcccaggctggtcttgaactcctgggctcaagtgatctgcctgcctagacctcccaaagtgctaccacactcagcctttttgtataaacctttttgtatctatcttttaatataaaccagtaatttagtaagaaaactgttgtcctgagttctttgatctgttctagtaagtgactgagcctgaggaggggtactggcaacttcgaaattatagctgatgggtcagaaatcacaggtgacaacatgtagattgacatcttaagtgggggcagtattgtgcaactgagcccttaactgtgggatctgatgctatttccaggtagatagtgtcagaattgagtttaattgtagaacacccagttcgtgtgtgccacagaactgaattgttataggaaaagaaacgcacacatcaggtgtcatatgtgaagtactgagagcagtagcagagaatctttcctcttagggtatacagatgggagttcataggctatatatttgacctacatcgccctttttgccaagtttattttaatgttctgctcttgggttctaacaaaagatgcattagagcctaagtgtatcaatgtgctaaataattaatatgtactctatagaaattttgttgaggctacagctaccaggatctcttgatattctctatatgagatcctatgagagagttttctcacaatttcatttcaagaaaatggctaccccgttttaatgatcatttgattaataagaactgtgaattgacaatgtctcccattttattttggttgccaggaagtccaggtgaaatacgaaataaattgatgcactctttcttgttctatataatatgtatagtatatttttaatctggtcatgatagttttcaattttacttacacgttccctgatcctgcttctctaatcttatttatattttgccattgttatatatcagaagtttccttctattttccccaaatagctcttaaaataaggtgaaatatatataaatatacaaataacacccataatttgtttaaatctaaaatgcctagcatggtgccagaattttagcagttaataactactgcttgatttatagggagacacattacaccttatagagaagcagtttctgagagtcagagctggctggagaagaactgcatggtccctgtcactggaggtatctgtgaataaactagataagcactttggctcacttagttaagccttggtttctttaactggaaaatggcagtaatagcatctcccttggaggtcactgtgaatagtataagttggtacatgtcaagctctcaagctcttagcacagggacgcacatttgaaaaaagtagcctttattattaatgaggacttgtgcattgaaagctgttttattagcttaagtacacttccaaacctgatggttctgttgggctagcaagccctcagtcatcagaagaatcatagacttagagtcttggaccaaccctgcctgtgtggctactgtgagagggatttaaacagcaaatgaaggactggatggagtggcctttaggcttccttccaccccaaagtgcgtggtacttcggtttcaaatccattcaatcagagatggcataagggtgtctgggagaaaaaaaggattctaatgtcattttattagaagttctcccttctttcatgtgtaaatttcacttgggaccttatcaattggatattaaagcattttccaggggggaaaaacactcagtaagaggaaaattgagaaaatgtctgagagcacttcatgccttcctgtctatctgtacataaagagctgctttcttcacagctttccaaacacaggttggcaacctgattatttccactaggcacagacagtacacttcaaacaaggaagctgaccagaacccatgccaaacatgatggatgttccagttttattaccatcaacctcggaccaaatcactccatcaggcacccccccattattttacagtattttgatggtggtatccttcagaaaatgggccacatctagaaaaaaagaacacatcagttccttatattttggctgaaatgaccataaaattgcaggtcctcagtgcagccaaggtaaccattttttcccactgacctttgtgtaaggagttgtcaggcatcggaatgtggctgaattaataggtaggacctttcccagagatatagagggcacaggctgatttcgcgattttataaacagatttttcttttccatgaaaatcccaggagaggcatctattacagaggttgggactataggtgtcacccaggataggccacaatatagattatccaggtgcacctaacaggagaaggaaaggtggtctcaataatgcagggcatgtttcagcttaatactcctgagttcagccaacactttggttagaaacatgattggaaatctcctgttgatagagtctctccaaatagactcttatcaacaggagattgccagtgggcaggtctgatggcacacaatgtccggcatgtggctggtcacataacaggtattataaacatttgttaaaagtttaaatttgccccagctgctctcaagtaatggcttttacaagtcccagacttctaggatcgaaaaatgcataagcaagtgaccactcctccctctccccttggaaaaccataaaatggacaagaaagtgcataagcgatgctagccctaaggggaaccctggccctgacacgttttgccatcctcctcttgttccctctggcttggtagtgcatcactgttcttgcttcctccacacttatgtcccagaggaggcaacttgactaggatacattgcaccactcagaattcataataagatcaagaagaagtgacttgaggactctttgtgttccttggttgcctgcttatcttttctcactgtggttgactgggccaaggaaaatatctccatgaagtagtctttgcaacaatggtataagaattcaatcagacatgtgactaggccttcctattattcatgatttcagtcataagttaatgagcaaagcaaaggttattccgttactagccacagctggctacagaaaccaggtgctatttattcagagagttattgaactgctggtatgtaccaagtagcatgctaagcactgtggggctaaataaaggtaaattaaacaaacatcctatgcacaaattaattatcctatgagggggaattagacacctacttacatgaccagagagtgaaaagtgcacctaagagctatggacagcgatttttgtggattttagaggagaaataatgtcttctgtttacaggtatctaccaggttgtacggaagaagcagttcatatgttggtccttaatggataaaaggcatctggacccaaggaggtagtggaagtgtagtgagagtggcgacaaccatagagcagaggggcgtctttagctagcaaatctctgtgggaggatacattagactaagaaggcacttggccattagattacgtagtcagtttataactgtatatgcgtggtgacgctcaaacacttttgcacagaaacctacttggcgtcacaaaagcataagacctcctggacaatggcctgcatcttcccctccccactaggcattctggttgtcagtggtcacaggcattttatgctaggccaatccttacactcactagtcacatatgggtcacttatagagttgtttaactgtccctgtgacataagcataggcttgcctttggcaactgtacaagacaagtcctaatcctattgttcttttccaagacaatcaatgtgatctcttgccaagaagtattttttaaacaacttcttaactctctcagttactctactagtcctgttaggaagacacatctggtttgctagacaatcaatgcaagttggagaggtttgatactcatgcaaacacagccagatcctcttttctctaaagtgagaacttttagaaatgtcttcttgagcacatcggaacaagcataggaaacagtaattagaatggacttcaatgcataatagatcaagtctacaaaaggagatgggttggagatatccaggcaacagaagttttgcacgtttccccaaattacattcctgttgcagatcaaagatttgtttttttttcaaaccacaccaaagcacacatttggaagccaaactcctcaagggcacttaagaattatttggtaaccttcctgttaaatttggagttcagcctacaagcttaaggtacaccaaataatggccttcactgaatcgctgccctagcaaacaaagcattgtttatgggattggagaatgacatctacatgaggtttgaagtattttatgtgcataatgtgtttcaagggccatggccagccagactacctgtaatgccattcatcaaataaatattaatatcaccaactcagattttgactctgttcttccttgtgggagccattcaacctaggagggttgatgagggaaatattgcccctatattccaaagctgaatggtttttccacttaagaaaggaagacttttcccttttacagaactggctctctcttgtccagtctagccagttcaaagcctcttatgtgaagcagtcagcttccatataccacaaccatgcataattaaaaactttaaggatgttaaatgcaatgcagtatcctggattggatcctggaaacagaaaaaggacattagtggaaaaaactggtaaaatccaaataaagtctggacttcagttaatagtaatgtgccaatgttaacttctgagttttggcaaatgaatcatagttatgtaagatgttaacgttgggagacactgggtaaaaggtatgcagaaactctctgcattatctttacaactctatgcaaatctagaagtattccaaagtaaacagtttattgaaagctttgtggatgaacttatgctttggagaataactcactggcagcactatgaggtaatctctatcataaagcaagtgtgccatagcaaaataagcactagtctaagaggtaggagctccatgtctgaggcccaggtctgtacatactttaagctgtgatcttgcattggccatttaacctcctatagaatgaatacctacatctgtgagatgctctgcatctctcacaggggtattaggaagatcatatacaaagatgctctggagaatgcaatgaaaacctaaaaggataacaaattcaaaatgcggtctgagcaagacgttgggtatcttgagaaggtactgagccatgatccgcaggcaaacacaaaggcagctattgtttggtcttcactctggaagtgggacagcaagagaaacttttcgaatggtacctgagagaccacaccagggtctctcagggtgcacagaatttagcaaccaagtataaagtagggcagtgagaacagcaaaggttttgcttgacatctcctggaatctctgaaactgcagagtggaatcacttctctatttagtgactgaagaggtggttcatacacaagtagaggaatcttgtggtcccaaatgctagcaccaccacttgttgatttgtcattccaattaactagttctttcctatggcagtacatctggtctttcttgcacaattccccagcaacaacaatatcaaagtcaactccttagcatggtgcacaagctccttcacatctgcccccctggctcatctcctgccctctcctccttacctccagccatgcacccctatgtgctgttccccaagtgcacatattgtttagtgctatgtgctcttcacctgctcttcctcctctctggggtgcccttccatatcttcctcaccagcgcaatccctactcaacttttcttttcctaattcctttatttatgggctccctctttcctcttctccttcttcttagttttcgtttttcacatcaagtgccgagtctataaagattcttccttgatcttttgtctctcccagtctcagctggtgcccagagcctcttgtgcccagaatttcccctcactcatgattaaagtgttcatctcagattctgactctctccctaacacatcctccacaccagattgtggtcttctatgggtaaaggtcgtgtgtgtgtgtgtgtgtgtgtgtctgtgtgtgtgtgtctgtgtgtgtgtgtctgtgtgtgtgtgtctgtgtgtatgtgtgcaagttatcttaatcatttagccaaatattcagtacaaagtaggtttttggaataaatgaatgaatgaagaaatggtcatgccccttagatctagtccagaagtatgcaggtacttctaaaaggccaggaaaacttgggattacatgttaaaagttacttctattagaataatttccaaatacattcatataacttgtggtgagctcacacagttcggtattattaacaatatgtacagaggattttgcagaatgacataatgagaatgacaacattttatgactaagtaccagataatgaaagaaaattaattaatttgctgctaagataaatgactatacaaacttaggggggaaagctgccacagctattatgtttctaagtttgttctggaacataaagtagcttccaccgaacaactcccacctccaattagctgtattagctctattaagttgaaatgcagctagagatatccggttgctgttttaaacattcccaaataatacattctggagcaaaaagcaaattttgtaggtaataggtataaaatatcagggaatttatctttcacatagtaattcacaaaagaaagggcaaatacagaatgcaaagcagtctgtctatccttctataaatattcgccaattagcttatagggaagtcacttaaaacaaataacctatttttttcaatgttaatattaattttaccaagccaaggcatgaagtcctgaaaagggaagaagaaaaacctacaacagctgtttatcttaaatctggcatcccttttttggctcaagaaaattgataaaaatctcattttataataagttcactgctacataaaatttatacatttgaacattaaattttatgggttttgtttttttaggggagtagattatactaaaattctgcttatttgcagacaaagctgtgtccttgagggtatagttgaagttagaaacaaaatgttttatcttatttttttcaaaaatatgcattaagcatcaactgtgtaccaggcactgttctaggtgctgggaatacagcagtaaacagaataaactttccaactttgtagggttacattccagcttaggggtcagtaaacttccataaagcatcagcagagtaaatacttttagttttgtgccaagactgtcttttgtaagactcaactccaccattgtggtacaaaagcagccacagacaatacatgaaggaatgagtgtagctgttttccaattcaactttattaatatagaaaggcatggggcctgatttagcatgtaggccattgtttgctaactcctattccagcgtataaaatttcttcttaatcaccaaaactaagtaggggtattacagaatttatggaatgatttacagaattatggaaatttagaattgaaaaaggacatccacttattttaaccttattttgccctgaggaagtaggatcatggttaaaagtgtggcctctggggtcagcctgctagtgtacaaattctgctttttcactaactataggtgatttggggcaagttatttaatctttcactttttctcattgataaagggaagtgaataatactatctacacctcaggagactcttaggataatccaggtaaacatttatcagggcatatggctcacaggaaactcacaacaaaattctagctattcatcagaacaacaacatcatcaataacaacaataatggtaacaacaaaaacactgagactcagagaggtgacaggacttgcagagggtcccatagctagacccctagcttactgacccctaagtttactgacccctaagctggaatgtaatcctacaaagttggaaagtttattctgtttactgctgtattcccagcacctagaacagtgcctggtacatagttgatgcttaatgcatatttttgggaagaaaaaaaaagataaaacattttgtttgtaacttcaactatgccctcaaggacacagctttgtctgcaaataagcagaattttagtataatctacccccctaaaaaacacaacctatacaatttaatgttcaaatgtataaattttatgtagcagtgaacttacaaaatgtccagtgtccaagtcaggataggaactcaggctctgtgcctccaaactcaggatctcgtctgatcacttgctgtccttcctggatctcggtaaatcatgtgatccatgagtaataaatgttgggtatgtctacaaatggtagcaggactcactcagttcaataacccagggaattctagagctgggctgtgctgtatggagaggcacttcagggaaacagacctttgagagttaaccaaatctttctgttagaaatgcgtctgctgttgtctcaccagtatgtccaacggtgaggataccagtggaaatcacccaggagaagaatatggtcattctgggaataaattctgcagccacggtggatgagagaagccaatccctctagatatgaatgaagccaggccttcagtagtagattcactgtgaaccagaacgcctgcaggaggttaaacattttggcttttttcacctgatggcaggctccagtggaccacccaaggagccctttgaaatactacttttcatggtaattagtttcaaacttttgcttgtttcacttaaggatcaggttctctaaaaacttctttgaagaccacagttgttcagcgtatttaatgtcagttatcctcaaggaaagagaaaaaccagttgtgaaagccaagggttttataccaccacaccctcctgaagtcccacagatttctactatttcaagcaaatcaagccacaatagcataaatgttctttcaaggaactttaagctaattaattgtgaatgtgacagctagagtacagagaattaatttcctgaggttggtctcccccaaccaaaaaatgtgttttttctgaagttggctttctgggatctgtcatttgtgggctcttacaggaagtgggggggggggggggcggctaggagaccaccacacttgttggaggcactcggaattcttttgacaaatggttttgctgacttgagacatctgggccatattgggcttaaatttgattttaaaatctttcttcttaggccaaagataatgttctctttggaaatcctggacattactgcactgatgcccatacacatcaaccttcacacatttttttaaaaccttcgttatcacatcaaggctatgtgataagagtcacacaacttcagtctgcctgtgacaccatggagcacacttgttaggatttttgctgattttttttttctgaaataatttttacatagtaccatttccaggtaattttcaaagagaaacttcatctagtgtttatgcttcaatcattcatatgcttaatacaggtgtatgggacatcttctatgcctgagagttaccaggtatctgatatcatgaaaacatggctctttcctcaaggattagcgagacagacacctagtcacaattcaagatgctaagtgctattaaattttgtggatattggacatattttcacttgcgagtgggagctaaatgatgagaacacatggacacgtagacgggaacaacacacactggggcctttcagacggtggagggtgggaagagggagaggatcaggaaaaataactaatgggtactgggcttaatacttgggtgatgaaataatctgtacatcaaaccctatgacttatgtaacaaacctgtacttgtacacctgaacttaaaataaaagttaaaaaaatactttgcagatattggggaagactttttagaagaaaggacatctcaacacaaggctgagaagtagttcaccaaggcaagtaaatgaaaagcacacatcaggctgagcatgtatgaaatccagatgcagacacaaggacctcttaagacctaaggtagtattactgaacaatgagagcctgggtttctttcacctgcttggtgtggtacactcttaaccttctcatctacctctctctccccaggacttagcatagtgcccgctattttataagaatacagtaataatgtcaaatgaatgaatgagtgttcttatgactttttttggacacaaatgttcttcccctgagatagtaagttctcttaagatagggtgtgaggctgttttgatgtaatccaaagataacttaactgatttagtctgtgagtaaaaatggctgttattatttttaaaatccaggtagatgttatcactctcattgttattataacactgttatcatatccaagcatttttaatgaaaacaccaaagtttatcttataaataacaaatccattacaaatctaagactctgttaacaatcaagatccatattaatggagttcctgacacttcactacttcagaaacactagtaaaataaattaataaaataaagcagtcaaagcaataaaagaaagatttcactttcatgctatggaattatgtctgaatatacccataatttcttccctttgcagaaaatggtaaaattgcctaaatcatagatcagtggtgctctaatgagacccgatttggattcacttctattcaaggcaaactaactgtatataaatgccttgctttaaacattcacaatattatacaaactatcccactgaagtgagtttgggctgggaagaataaggtgtggagcctaaattaagaattttccagcgttggccaggtgcggtggctcacacctgtaatcactttgggaagccgaggtgggcggatcacgaggtcaggagatcgatgccatcctggctaacaaggtgaaaccctgcttctactaaaaatacaaaaaaaaaaaaaaaaaaaaaaaattagccaggcgtagtggcgggtgcctgtagtcccagctactcaggaggctgaggcaagagaatggtgtgaacctgggaggcggagcttgcagtgggccgagatcgcggcattgcactccagcctgggcgaaagagcaagactctgtctcaaaaaaaaaaaaaaaaaaaaaaaaagaattttccagtgttgaagaggacagagtgactttctcctcaccagcctcaccctctggggacacagagagagctacaaatttggcattacccagttggtggctggtgtgactcagaaggagggaaaatcatggctcagaaactgaagatgtgttgaaaccaccttgatcttttgaggctccgcctgctcgccctgcagtggctgagtcctgaccatcctcggaggtcactcctgctccccgaaagctctgctcctctgctagtactttttagccttcttagctaaatcttaacttactattattgctcagacctctgtctgaaaacctgggccctgcagaaacagcagctattggaagcaatactcctgtaatgacctactgtgcttatttttctagatgaagtaaattatgtctgaggtaatgtcttgcagggcgttagttaaggaaaaattcccattaggtaggcctccctacaggtatccagaattggtgtcttatcctacaatgtttattttaattttcttaatttaagctccttggattccagacctccagaccaatggtggatctgctcatcaagtcccaactcagccactcatctgtcagcttgtgcaggttttgggacaggatctgaagacctccatgacctttctacttcttggagtcatgatttctaaaatctggctggccttggtcttcttggctcccaaggtcctctactgcccaagttcctgtgtcacaaaatcaactgtttccatgtgttagaagcatacacttcatctccactagcagcagcaaagaatgatcacctatctttgtaggggagcaggggtttactgcaatagagaaccagggtagtggggcccacagtgctgagtttcaatctgttgctagttgctaaccaggtggccttggagaagttttttttttctttttttaacctttccaaacctcagtttgttcatcagtaacatgagaataattatggtacccatacatcataggactgttgggtagagtatatgagataatatatttaaggcctttaacagagccaggcacacaatcaatgctagaaatattagctgctcgtgttagtgttacttagagaagggaaagcaaataactgtcaaaagtcaataaaatgatactctaaacatctaattaaatgcaacctgataatcatagaactgtacatttatatgatttgaagcattttttcctaaaaagaacagttagtttctatgattaattatttagattacagaaacaaatttgaggactcactttaagaggacacgaagtggcaccaatggagatcagacatcagaggatatcaatgaaatttatgtctaacaggctaatagcactgagggttagggtcagggttctggaaattccactatattaaaaggaaatgcttttaaatgttacttagcagaaacaaatcatctcctttttcaccacttgtaaaataagtcacaaacataaaccttccacatctacgtgccattttagaatgctgtttcctttaaaagcacacatacaagccatccccatgaatgtgggattgtcactgggtcactagataaaggagatttataaaatctgtgactgcatctcctgtaagcatgctttgaagaagtaatctactccttcacccatgggtcctagaatatggcctgcacacagacaaatgtgtaagttgtaaggagcagttctgcctccctcagaggctgaaattctttcttctgaccaatcacatctcaccttactctttggtttccaggaacatttaaggattaactactggaaatcctgtaggtctataagcccatgtatttctattccctcacccactcctcaccctggcattggtttggcatccacctcttcactctatcttacttttggtcctaatttctcaacaatgatttctattaggtcaaccctactgtcacttatgtaggtcaaaaacctttgaatttcaccaggcacggtggctcatgcctataatcccagcactttgggaggccgaggcgggcagatcacgaggtcaggagatcgagaccgtccgggccaacacggtgaaaccccatctctactaaaaatacaaaaattagctgggcgtggtggtgggcacctgtaatcctagctactcagcaggctgaggcaggagaatggcttgaacccaggaggcggaggttgcagtgagccaagatcatgccactgcactccagcctggtgacagagaaagactgtcaaaaaaaaaccaatgaatttcaacaacttcatttgattcaacctatttttcccattgttagtttatggatttgttgtaggccagctcaaagcctccggaaaaggagaaaatatatgcatatagcaataatcagcaacagactggtttttatagatattcaacataacacaaagaaattaaatttaatacgtgtctgacctgagaaagccagaaataaaaaaatccgccgatgcatttaactttttttcttagggtatgccttgctttaaaggtgaggcaggtactaatctacaaaacaaatcttgccacctgacacctcagcctctatctctcacccctattttaacctcaaggcctcttctgtagaccccattatggactcctcaatggttagacaaatgctgatctaaacaaggattaattagaagtgagatgaaaacaatgctctgtactctgccttttccacactgagtcttatgactccaaacttcatcatgatctttggacccttgctgcacctttcttattgtcagcctctgctcttggactgcacttgtctttcttcccactgccacaccacacccctatggcctcctaagctgcatggctcctgccattcccacatctggacacactcagcatgactgtctctgctgtttccagccccactagagagagaccctcatcaggccaggaggccccagacaggcacctctgaccagccctgctgggacccagtgctggcccaccatttctcccaaagggagattcaatatattcaactgtcctgaagtctctactctacattggatgaaacaccattttaccatgacttagaaaatcaggatacggcttaaactgcgaggctggccattagagctgaggctcaaagcacatttcaaaacccaaaatggccactctgtcactgtcatttcatttttagtaaacctctagcctttcttttaccaccaaaaaacaagaagagagagagagagagagacagagagaaaagagagtgggagtaaaagggaaagagttagaaaacagggtgactttttctgaacaatggttgcattaaaaagtgtccttgaagcagagagaccactcaagaaggaaataacacctcaaaccagggggccattcaccaaaaaagagttcacatttgaagctctttgcaaaatgttttcgtgtgtctgctttcccttgttcattacaaaactgatgaaaaataaagatgataagtatgtttatacaaaaagaacccattcaataattcatcaccttgttggcttacaatataactactccaaaagaaacgtgttttcctacccactgaccatgaatggatacctgagacttaaatatggctcagagcattgtcttcccgcgcacgtgttgcggaactgtccccagtatgctgcccgtgctagttaacccaggtggggcttcagccttgatttgccccactgttctgtatcttccatctcttatgtctcccactacaaagcatgctggcgaacacccaaagttttgtttcgttgcaaccactaaaattcactagacacggaattatagtatttttcagcctagaatggcattctcgattaggggcaattttgtcccctagggtatatttggcaatgtttgaagacatttgtgattacgacaactaggaggggagtatgcactgacctctaatgggcagaggtcagggatgttgctaaaaacatcctacaacgcaccagacaacccttcatgataaagaatgttctggaccaaaatgtcagtagtgctgagattgagaaactctggcctaagtggaacacagtagtaagcatctgctaggccaaagcctagggagggaagggatgacaggatttgcctagaactacccagtttggaggtggtagagctacatgcggcactcaggttaggtagtgctatatatttcctctacagcatgtttattctaaaaggacttaccctttagatggagcttaactacacacacacacacacacacacacacacacacacaaacacacacacacggtctagaaggatacacacctagacgtaactggtgattactgctggacataggattgtactgattttccctccttgttctgatacgttcagccaagatttgtttggtttgttacttttgttttgctttacaataagtacttactgattttataagcagaaagaataagaaactatttttattttgaaaaactatatagggaggccgaagtgggagaatcacctgagggtatgggttaggagttcgagaccagcctggccaacatggtgaaagcccatctctactaaaaatacaaaaattagctggtcttggtggcaggcgcctgtaatcccagttgctcgggaggctgaggcaggggaatcacttgaacctgggaggtggaagctgcagtgagccgagatcaagccattgcattcccgcctgggcgacagagagagacatcgtctcaaaaaaaaaaaaaaaaaaaaagaaagagagagagagagagagagagagagagaaagaaagaaaacctatataaaatgcagttgaatttagcttgattagtatttattgccggtgtgagcacagcaagaacagcattacgaatcataggaaaaggatggatacgtggtacaaatagggactcttttggaaaactgacaacatggattcagagtattaaatatctaaaatatggcttaataaattatagtttgaacaaaatacataaattatattaaaaagtgtttgtttaaccccaaatatatgcaaatgatggaatggtatgcagctgttaaagatcatgttttccattatttcagtgttgatctccccattaaactgaagtccatgaggccagggatcttgccttttcaattccttctgcatccctggtatccaaagaagttcacacagtaggtatgtaataattattgttgaatgattaaaatgaataaatgaatatagttatcagtgacagtattacagataattagaatctttttatttttctgttaatatgtttctaagattctccaataagcatgtgctacttttataaatagaagatagattgtgttgtttgtgcaaaaagtaaaggaacagagaacttaagtaaaaaagaaaaatggagtacaaaagagtatacgaaagggtgttgagtacttggaaagcccattccacgatgcaactgagggataccacgatgtggctaccatggattccaagtgtgggtgttatatttagccaattgacggccagcactcctttgtcaaactggttttctcttccagcattcttctctgatttgagcttttctcccactggtaacaccaagagctaaaacaatggagaagctacaaatgagattcgttggttatagcctccagtggcccccacagtattggaggcattgtggcagccgtagaggctggaggtgcttttcaactggattgcgtccgtggctgacaaatggaataaaagagctatgctgtggtgctcaaaatagaacagaaaaaaaaggatcccaaagagagaaagagagagagagagagaaggacaagaagaagaagaaaatggcacagacatgagaggctagcttctggaacaacctaaaaagaccaatgttaacccagacccatgaatatgattctcacatcctttgtagaattttttttttttttcaaaagtgcctctttgggactgcaaccctgaaaaatgtcatctgcccctttgctggaatgactggatacttatgtcacccagtagaaaaaaatgcctggtgattttatgtatatttgactacttgtggttatctgggtgaggtgactgaagaaacaaacaaatctaaaaatataaatccacatttgtgtatggagagagagcaaaagaatctgagggaaaaaaatgaaagagggatacagggagagagacagggagatgtggacagcctgtataacagggtgggccccacagtaactgtcatggggtagagttagcagttactgaagtggtctggagtttattgactctattaaggtcctatgtcaaaacccattctctcttgccttcttcatcctcccaaaattttgagacagtatgtctttaccaagagaaaaatcctttcctccttcatttagagctatagctcaagatgaaaacagcccccaaaagagcacgggagtcatgagtgtctcattgtttttgagcacaggttttagggacatagagcaaggatgattgggaatccaggggtgagaggaaggtgggagtcactgaagaaataacaggcccccaaaacaaatgttgttttccttatagtttggaccatagcaagccctgtctttaaaagcagccttttcatttcattctatgaaaacagcgtatatgactgtagtagattaaagatggctatatatttttaacgctcccttcagtgagaagtgggtttgatttccactggccttgaatctggactggtctataatactttgacaaatggagtacagtggaagtgatgccatgcccatctggggctcagcctataagagaactcatagcttccatcatgttctcttgtagccctgatcttccacatgagaagtccaagtactctgtagtagaaccatgtagagataacctcagaaaacatggagtgtgcagttgaaccccagacttccagctatccccgccaggttaccagatatacaagtattgccatcttggacccttcaatgcagcctggctgcagttgaataccaacaagtgactaactgatgctaggcagaacagaagaattgcccggcctagccctgtctgaattcctgacccaagaaacattgtgagatataacaaaatggttgcggctttggctacagaattctggagtagtgtgttttacagtgatagacagtctggtccaggcaagaggatgacaatgtctgtctactttcaatgttggctttgaatcaaaaatatatatatttcagatagattgatcgacagaacacaacttgtagtctttacggaatgcagtacaatgcaaatgctatctgtttgtctcagctcaaatcttagccttgccatttgctctgcagtatataactttggcaaactactaacttctttgagcctcaacttcctcatgtgtaaaacaaggataacaacatcgccttgatggaatggttggaattgttatatgagaaagcaaatgtgaagcacggagctcaggaagaggtatgcacagcctgtgctccctgagccatcttgtctgtgttaacgtccaattttcaaatctcaggcagcttctctgctgcctcatttcctggtcactctgacttttcctagggaatcacttccccactgtttgtcttgttgacatttccacctgactgactgttagaccttcagcaaatagagggaatctttaaaagaaccatatctggtatccaaaaagtccttcagtagccgagaaattgttatatgtggagattacatttcccccaaaaaatcaaagaacatggttttttgtaaggcagatgatctaaacacccataatatgaacattaaaaaaagatcaaaaaggagttctaagaattgagatggtaaaaataagaagaaggttctaactcgggatttcattgaagtgactggacaaaggtgagcaggtgggggcccctggatatgtttcccatctcccggtcctacagctcacgagggctgaggcagtaactaggtctcaaaggctatacactgcaacgtcttttgcctacaaccaagtgcagaaatatcccacatgaaaggcccgaattccatgcctgggtggttcctgtggaacctttccttgcacttgcttatgttaaactccttatagagtcagcctgccaagggccacccagtgacaaccatggatttcaattcctcctgcaaaatatgtcaacccatttgtttactcaatatagacagctttgatctccatctgaggtgggtctaacagtaatgaaaaaagcaacttttcttgcatgaacaattgtaaggatgatgaaagaatcaaaactctgaaagaacaacttaagacattactaaaaggactgtgtcctcatccaggttttgcaatggggatattttatagttacaacttcttcctagacaactgagtctctttctgaaatggtttggcacacctgctaagagtttgtggcatagacttggaagacgactgagaactttgaaatccctaccctttgcaaggaccagaggacactcacagttgccacatttaaacccaacagcccactagaacaacatcatctgtgactatctctcttgtgctcctcggctacaagatcgtcttccttgatagtttttattgcttctggaagtaatttgctcttcatcaggttatcacaaatgaaaaccaagacaggtcagaagaaagctggtttctttgtcagcaagatacttccctttgccagagctgagagagagagagagagagagagagagaaagagagttggaattagaaaaaaaaggtttcaagtccctttctgacatctgtgatcttttaacagagatgtaaagcatatgagatttgcaacctttcgtggcctgaagggatccagttatttggccagttgtgaagacatactcttgttcctactcgcactgtcatgctgtcatggggggtgcatgcctgtttcatgataaaaggaagctaaacggggtttttacaggaatttcagaagtctcagaattattgaagactcataccaggatgaaacccaagttcttcaaaccaaagtgaagcaaatgtgacatattatagacaagagcagaggagcaggaaaaaagagaaagaaatgacaaagaagcaggcggacaaaatgaatagaaaaaatggcatcttttcatgcatgttggatgtaactcctgggacatcaatttctttctatgtggttatacgtttgtggttatctggcatttggacgggcagaatggagggaaggggtttttaaaaataacacactctctttggcacaggacagtactagcatgaaaggttggttgtttcaaaggactaatccaggctgtggggctgtcctgcaaacactgaatcatgaccttgccggcaccttgctgcgggcatcagcaggagaagatgtggaggttccagcaatggtattttgttccacgtaagaccaaccacattccctcacatcttacttcacatagtctagcactccgtgtagtccaatatgggcatctaagaagcagcaggctaataagagcccaaaatgaagaaaatctaaaaattagcccgacttagccaataaaaagtagctccagctaacccagccagacctttaggaaagagcccaggaatgtctctctccatccttgccctgctcctcaacctcccctttgttcaccaggctcccaacttctcttcttgcctcatacatacccggccacggatgctgtctcatcggctggatgcacaacacttcaatggagcaagggctttctgttgttgttgtacctgccctcttgctccatcaactccaggtgagtatttcagggtcccagctgggcggtcccaaacctgtcaggtctgaccaccccacctcaggggacactggcctgacctgaagcaagggcagcaggccggtgggcctggtcaccagtccctggagaaggtgtttctaccacgttctttcagtgtggtgaaaaggacatgtgtgactgctaaggaagagttacacggggcgaaaagggagaggaagattacgtgtgcacatgcacacacacacacacgcacatatacacatgcaaacacacacatgcacacacactcacactggcagtcttctcagggaaagcagctgatgattatgtttccgcaactgaataaaatcaaacccaaaccacaaggtaacagcagccgtctggcccgccctacacatggcatttctgggcacagtgtggccgattatatccttcaccccacggctctttcagccctgctgtttctggctctcctcaagattctctttccctttaagacatcaggcgggtgcttgtcaattagagtgagccacagagaaaagctgtctgtgctccgggagaggtgaacctgcttcttgatgagcccttcctgagccagcagcaggcctcctgcccagagaggatggggcagagagatctgaccaggggatgggcagagggagcctcacacattcctgctccgaggagtgggagggtgggtgggggcagagtaggagccttcaccacagaaaaacaatgcgtcttcaattgtacagaaagccactgggatcagaagctgctcacgctgtttaagagatgcttaaggaaaatggggccacctcagaggcacctctcctgacccttctctgccacccctagccccgtgctcagggtcagagttgcctcccatgtcgcacacttatgctgtgtttaccccaccattatcctggctgcagctgactacttcccacttgaactcctcgaggcaggaactagattctccggtgctgtgcttccagcaccacgcccagcacagagagggggttcactcagtgcttgtgcagggactgacatctaggcaagcttccttttgcagaagaggaaactggtgcttagagagaaagacagggaagggagtggggcggggggggggggaaggaaatccccccttctggaataccagggagcatgttaggcatctggcactcatttgttcattttcctctcagaaccctggtgaattaggcttcactgccttgcagacttcctagtgagtgctgggacatccatttatttgggagagaacaaaatgcacagttgtacgaaggcaaaggctgaacagttggggagagcgacagttggagagaagagcatcagaggcctcgtggtaaacccaaatgagagctgcgctgtgcgggaggatgcctgggaggcaccaacgcccctggaacttagatctggacggccttgcaggcaaagatacacaatcccccaagttaaaatgttgaagggcaacagaccaaaaccagaacaacacagtttccacctcctccccttcacctttgcccattagcagagttaaatttataccagagttaaatttctatgtatgaactcacacacagaaaccaatatacactactactggaaacgtaaatcacgacaactcttttggatggcaacggacgtaaaaataacttaaaaatataaaattacttgtgacacacaaagaataagagattattaaacagcatcaagtaatttaccaactttgaaaatagaggaaaatgtatcatacatgtattcatgtactctggaaggttccctactgaaggcaggccctattgggattctcggagtctatctttccatagtaagtccctgagaggtcagtcttattttccaactgtctgtgctatgcacatacgcatccctgcattatatcagtacttgtttaaagtcacctgatgttagagctgaaggcactttcacgttcatttattctaacccccttattttacatgtgggaaaattgagagctcaatgagttttctcaaagttaatagtggaggtgggcctggaatactgcatatttctaaaatgtcccatttaatgccactctttaactacagaccacaccaactcccctcagaagaatgcagagtacacaaattttaaataaggaagaaattgcatgcttgccatcaagaggtgtaccgcttgtccacaccatctccgcttttctcttgccctggaggccccagcagcagaattgtgagcacataagccatggaggatgacgctgcagaggagaacatgtgttcctgtggtcagggcatcagccaccatcgccctgctcggggccccttcacagggaccagagagagcagtggtgataaggtgtggccgagggctgttctttttgagccattttagtgatgctgggatgttatgcaaggaaatctttggcattgcagtaatcctggattataaataatttagcatatttctttgtaaactacaggccagaatccttgcaaataagaaaggattaacttttttagaagtacttgctcttgagactttaagttcaaggcagaacaatgcttgccgtggtaattccatctattttaagatcacaaaaccataccaagttgaaaccagagcagaagatattaatgcagtgctctctctgaagtgcccaatagtgggacgagaaagctttcaaagggaattaagtagacagagaaagctccctgttcatgtccaaatcacaaggaggcggttgaataggattcacagttctccgtgggaaggacccacaccacagctaatgttcaaaacaggggggagatgtctcgggaagatcaaggacccagaattctgctgttagaatcagctgcctgcccattagagcctcaaaaggaccctctaccatgtgtgagccaatatgatcctgcaaatgagcccatttttctttttgtaactggcccaaactttatctgaaggaagctatcattatgtaatatttccaaagcacccttgatgtaaacttcagatctgatatgtgggtgtatgtatgtgcacgtgtgtgtgcacattgtgtgtgtgcatgtgtgcagtgggagagggtgaaaggacagtgaagagtcagatgtacatacaaagtagaaaaactgatgggcagctgctctgaatatgcaggaacagagaagcatccagggagaccctcaggtcaaggctcagcacctggtacatcacacagacaacagacatgagaggaacaatattagctccagagaaagtcagagccaggaacagtagaaaagtcaaacgggcagcaagaggcggagactcagaaaccatcagccagtaagtaggtggcaaggcaggagcatgaaggactaggacagtcagtgaactgcacctccaaagcctgtcctccagtgcccactctgctctggcctctgcctgtctttccagcctcatttcctgctattctgcacgtgactcctttactccaccaaattataaatgcagcctactctgcatgctgttttctagcttcttgcctttggtttttctgttctttgtgctaagaaaatcctttctcccttctcctaaaaatgtatctcattttccaagatttagctttatggtcaccacctcctggatgccttcgtggcttcccaaaccttcagggtgggtttagtaccactcctacaagctctgatgatatcctgccaatttccaagcttcctccagaggaagatgacaaagaagtttcatctttgaaaaaagctctaaaagaattatggctgtttggggcaggcgctgtgttgagaatgattccgaggcctcatccagaatccattggaaagactgctgcagtcagttacggatgcctgccatttaagggtgtgggttgaagtttagccattcctgatgaggccaacatcttcattaggcagatgaggaacctgaggctgaaagatgggaaatgtcttgcccagtgttacaaggctgggtaacagcacactcagatgggaattccaggtcttgggattcctaagcaagtactccatttaaataagattcccaaagattctaaatcaggaatattgaaactcttaacatatttttaacttttttccaggggaggagggtaattatatagtgaaggagccagtgaagaaaaacttgaagcttttgcaattttgcttggacacccactcacctgaacccgtgccttataatgttttctcctgcccaatcctccaaaagtccccgcctttatgctttttttaagtgagcactgttggtaccaccagtgtctattacccaggttaaaatgaagacttcgagctgactctcctggtatcacgaatatacaatcaaaatggatgcctacacctctgtgtcagggaggaaaagtagaggaagttgaagccacattttccaacttcatccttcactcctttcactctagaggctgaaactttcctgacaaagaaatatacttagaatggtttcattagataaactctttccctatcttactgtgaaagaaattttccagtgagttccagtttcaggaggttacaaggtaaaagggaaggaaagttggcatgctcccagcctgacaagaagttgtcgcattaccatcaacgtcacataaatttagctggaacattgtatcggattctataatgcacttacgtgagcgattaaatggtgagaaacacataacatttgcctgcccaccccctctcccattgccctctgcttctgtgagagtttgggattccagatgaattctcccagcatagcctcagcttgcaaagggtcatctaacctttaaacttcagtccagcaaagcaggctgaagagaatcaccagggtgtctcctgttatgtgcttcaacatcaaatgacctgcttcaccaggttacccaaggacacagctttaaccaaagacgtgagaattcccagaactggaagcaaatgcgagctgatgataggacattccccaaaccccctatcccaggatgctcgacagcaattagcagccatgtcctttgtctcacctctgctgtgtttttagcagctcagtttcttcagaggacaaggcaagagggaatgggattaggctgggagccctggttttctgagggaagagggtattaaacattttcacttggagtttctctgaagggtttctggacaaccaaacccccactccgcgcccctgcgaaactcctcctggcaccgcccctgactttctattttctttaggtgcccaccttacccctccacaagaaatcaaagcagccgatatgcagttgaatttccaagtggattcccttgtatccgtttgtctgggtgtgtgtgtgcgtttttaaaaaattttaaattttggataagccctctaagaaagaggctcctaagggaagcgggggctgaaggaaggaagaagtgggtgacaaagcctctaggggatcaataaattcagctgctcctgtgtacaagggaaagggcagtgcaggaagtcagatgggagaagaaatcccagaatcataaattttaaagctgaaaggatctttagaggtcacctggcataacctcctctattttataaatgaggaaactaaaagtcagacatgctaatggacctgcccaaggttatgtaacttggcgatgagaaaaggaggacccaaacccagacctctcaagtcccccgtctgggccccttcatcttcttcacagcccacagcagctgccacctcggccgagcagccattttgatcgctaaagtgcctgcgggaagaccccatggccacccccagacacttcccatgatgctcctctcctcagaagccatgtcatggctgcccactctctccaaagactccctccaccagccacgcggcccgcagccagagttcttcctgtgaagagccctcaccgcttcacttttcatgtgaagctggcaaagccgcttcagcgatcattttttaacacggcagctccctgacaagaggattaaagcaggcggctttcaaaaaagtatcaagaataatttaaaatgcaatatgttaatgcttgtccagagttttgtacactttcgtgaaaagtcatcaatctctcccgccacaccctaacgacaatcctgtaactggcacggttttctgacattaagaaaaaaaattagtgaacacagtcataaattaggaccagaaatctaactgcagatgaggcttccgaagtcacaaagcaaaattgggcgtggagtcacaaactgaggatttttgagggagtaggtggtggttattttggaggatggttcctttgcagtcttcctggaggatgagcaaggggatcagaaaactgccgctcaaacgctagtgtgcatcagaatcacctggagagtttgtgaaaacagattgctgggctccctccctagactttcggattctgcaggtctggggcaaggcctgagaatatgcatttctagcccgttcccaggagctgatgctgctggcctggggaaccatgctttgggaacctctgggctgaaaagacactttcaggcctcccctggtgttaggacttcattaaaatatagaagcaagaatgtgaggtgcaacttaaacatccctgcacaggcacagcaggcaaggcgggaaatgaaatcgcacagacaccagggctcgttgtcacagcatcaagcagtgccttaaacagggaggtaagcagtgtcctccagctgctacagtcacctctaaaaagataatgcctgtctgagcaaaagcaaacaccagaaggcttaaaaacctggggtccccatgctcattcctcaagcagttgaaaatgtctttatgtagagaaagtacagtgtaaatagaaagtagggctcgatttccacaagctcaagtcaaagaatctgctgagaaggccacatgacacacgaaatgaaatccaggtccttgatacccggaggcaagaaagcgaacggaagatccaagacaatccaaaggttcctgaatttttacagtaaacagttctgatcggattcacttgctattttggaacatacatgaagttcattaactggcatatattaaaaaagaaaaaaaattagaaaaagaaggagctggaggacaaatcagtaattgctcctttagagcaaaccaaagttactgagaaaatctcctataaaggctctgtcaaaacaagtcacttaaggattagtgagagctaaatcctccgtcagagagatttttctcaacagtcgtaaatgggttttagtatcggaaaatcttagaaaatatacttctcctgcctccacccccctctcagaatggctctttcaatagctcggcatcttgtgggagcaaagtatttccttaggctgaggctttttatttaaaaaataaaataaaataaactctgtcattcatggcaaagtcagtggctggaaataactctttacaggcatggagtgcatgtttcagaggcttgcccatacaacgcacatggtcaagtacagcctcagcaatttccctcctaacaattagtataagctagggctcttactttgactttttaccttgttccacttttggtctcattttcttaaggcttcactgctcaatttgttcattttgtgaggcaagagcttaaagttcatccttaaaaatgcgtaggtgattcagttttttaattagaaaaaagcaaacactgctaatcccaaaccttttcaatggcagccttctaggggcacacattttaattccatcagtaaagggtcatcttattcattctcttataatcatcgtgggggcccatgctgtatttctgggcagtctctggagtctatgacactggattacagaggtctgtctctgttcattaagtgagtgttcagagaagacccactcatcctgtaagcacttagagacactctggagtttgatcctcatgagagggtgacctggcaaggccattttcctgtctgcttcccagatggtcacactcttctttgtctgcccaagccttttttatcttatcagtactcaaagctaacgcatcttagacatcgttggtaccaatcaatggaaagctaacacacttgcacaacagtccatatgcgaataagcattgattttaccccccttggttatagactgcatttctaaactttccatttcctccattagaccctttaaaaacatccatttgtcagacataaatatttctcctgatacccacacaggaagtcttagttacaggcctggttttaggcattactatactaggccattccttagcatgtgtgacatgagtgagtaatcagaaatcccaaccccaaaatatttcccttcccaatctaccttatacccaaaatttcaccactgcaaaatccttaagacactttcaagtccagaaatacccttttaatattaaattattctgagaggcaacccattaagcctgtttaattagcaagactctggagaatttagctttttttttttttttttttggctgcatagccaagggaatttagggttggaatgacacaggcctgagtggaaattcaagagctgtcatttcctagcaccatgaagttgggcaagtcacttaacctctaagaggctcagctctatcactttatctaagtggggcctgacacttgggtagtactcaataagaaaatttcctttctcatgaggtggctgctcagggagagatggtcaggacagaatatctacccaaggttgagaagacagaggagaaaccagggcacatcctggagaaggcagcttcaggagtgggtcctggggtctggggtggggtgggagacgttttcgatgttgtttaatgggcggtagtgggaccaaggagagttccagtcacttggaaaacaggactgcagagtggaggcaagagccatagaaaagagagaaagccctagaaggggctaggagggccatcttctgccacttcactcatctgtggatcaccaggtctacccacagttttacaaatttcactccagttctgccctaacttattacatatcagggcctttcactcattatctcaaaaatgacatatagagatctttgcctgtggggttaatgagtaatcaggaggtatcacattaatctccatttcactccagaataagttaaacagttgcctcaaatccttctcctgtagaggaagaggggtgtaaatacgaggtaaatatgtaaagaaaagcatgaaccaatgacctcagtaatggttccagagaccaggactccctattctgggggtgaggataaaagtttccatgtctgatttacccttgctcagggatgaacccatgtttctgtattccacatccactggatagatgccctgcagctaaagacatctttttgagcccccaaattgaagcctttggatttccctatgacatgtgaattgtatttatgtaggtattctgatgaaattgcacttccctcaaaaagatgaaacttaaatgaaagaggatgaacctggaacatgtgcagtgtgaaaatttacacagcgaaggagctaagtctcagccatgatcagtctattttgagcttcctgttaagcaccaaagtgatggaataggacaaagaaaaattgtacccataataaatagaggatgacccctgtgaaaagtaaagatagagcccatattggattagaaaaagacttgatatttccctccacctttacctccttctaagtctatccaggagtaacaaaaatgatgaacatgggatcttaagtagtcaaaaaactgtaagattaggaaaggaagctgtaattgtttagaatctactatgtgctagggattttaggtgtactgcctcatgcaatagatgagatgagagcacaatgaagaatacttttctccactttacaggccaaagaagcagaggctcagcttggctcaactgcatatcagtaaatgacaggaataagattcaaactgagttctgatgactccaaagaatgtgtggggcagggtcaggatggtctttaggctttggaggccttctctttactggaggcacaggctttgttctaggttgtaggaagagaagtaaataaactggtaaatctttctgtataattttctcagggttgaaatggtggcaggggagctggccccggtggctcacaaatgcaatcccagaaactcagaaggctaaggcaggaagatcgctttgagaatagcctaggcaacacagtgagacattgtctctaaaaataaataaataaataaataaataaataaataaataaataaatttaaattagtcaggactggtggtacacacctatagtcccagctaccctggaggctgaggcgggaagatcacttgagcccaggagtttgaggctgcagtgagctatgatcatgccactgcatcagcctgggtgacagagtgatactctaactcttaaaaaaaaagagagaaatggaggcaggaaaggcagaactcttcagaaaacaaggcaatgcattctggcttttttggtttttgagaaacatcacataggctggatggtgaagtgctctaagaatatctattcaaaatgactatgaaaaggttctatctagcatacagttttcaggaagcggatatgagggcacaggggatgggtttggggtcaatgaatgcatgttctcaggcttactaatagatgagaccatggtagatattcccttgagcttccagaaagcacccagcaagttaatgcattcatgccactgtaaactagcatttgagtaaggggtggtccaaacaccctacttatggaggcaaagagcagcagctcatctgcagaccactaggggttgttcgcaatgcaacagaaaccacgtcttatccttgacagggcagccaataggtaatcatgttttacacatgtcattttccaacttcatcttctttcatccttctgtagtatctcccagggaagatctcatagaagtaactgcatataccagtttcaaacaccctcaatatgaagagcatggaactctgcattcagctacctgggcatgtcaaaagcacatcatgcaataagccaatgtttagtatatggtccaacatggacgtggtaccttcacagctcttatctgattgaaatgcatagatgtggataggaaatgacatgcttactaattttctgagaggaaaaaggggaaatccagtatagtgactgagtgaaaagttagtaataaaaggtaagtgacccagacagggagtttcctgagcaagcataacccagcagtttttagccacacttctttcatggctttctcttcaagttaggttgacagatatctgatccaatgcttggccatctactgaaaccacctcttaccattccaccaggtaaggacgtcagcaaaaagccttttcaccacaagtagcaacctactttccaaaacaactccccgcacttcaaactaaaccaacgactaagtaaacccagattaaatagagctttatcaggatggagtttgagtaatctctaaatcaacaaattccagggaatgtgtgtacagaatatccattatacaaatgtcagaccacaaagtcaaactctttgttgagatgctgttaaggccttccctaatacagccaatatagcagagtgggagaagcagggtcatgctagcttctattccagagcctgtttttccttatgcaaaggccagtaaagcaaattttctgcagaattattttagttgttcctaaaaagaacaagatagcctttcctcattagtctgaatagacagctccttttctgagttgctttaattgctgtgggttaagcttcactatcacacatcctcacaaccataatacaactggcatcatttggcgctttttgacttggttaagtacaaactacaaagtccaagatgggaaaggtcatttattgtctgccagatgggatgtttcaaaaggaaatgatttagtcacatcattaggagaaaagggaagaattaaaatgtatgctcacatacagatttcggtacgcacacaaaatgatcagcacaggaaaacataaacagtagcccaacagcacacaagttacagcacacaagttacacagacttccttaaatggtatcttctacattgatgttgaaaaatgtggattgctattttaatactgctgtcataacagtctagtacaactggtagcatgaggctgaatatgcctcagagtcagatagagctgggtccaatacgggactcttcacttactactcatgtgtgtttggggcatatatcttatttccaaaactgccttataatctataaaatgaggaccatatgggctgggtgcagtggctcacccctgtaatcccagcactctgggaggccgaggcgggtgcatcatgaggtcaagaaatcgagaccatcctggccaacacggtgaaaccccgtctctactaaaaatacaaaaattagctgggagtggtggtgtgcgcctgtagtcccagctactcgggaggctgaggcaggagaattgcttgaactagggaggcagaggttgcagtgagctgagatcgtgccactgcactccagcttgggtgacagaggaagactccatctcaaaaaaaataaaaaataaaaaaaaataggaccatatggccttcctcctaggtttttgcatagatataataaggttacatgtaaagtatctgcccctgacacatactacttcctgaatattattcctttccacctctccttaggtgtgtgtgcatgtgtgtgcatatgtgtttagtattgaaattatgcctatatgtagaaggcacacaataaatacttcttgtcatttactcagtaatggacattgatcatttaccttttacactaagtgagaaagtcttaaatgatcttgattcatgattttttttttctttttttgaaatggaatctcactcttgtcgcccaggatgcagtgcagtggtgcgatctcagctcactgcaaccactccctcctgggttcaagcaattctcctgcctcaacctcctgagtagctgggattaaaaacaccagccaccacacccagctaatttttgtacttttagtagagatggggtttcgccatgctggccaggccagtctcgaactcctgacctcaggtgatctgcccacctcggcctcccaaagtgttgggattacaggtgtgagccaccacgcccggcgattcatgatgttcctaatggttctgtccatttttacagcccatctcagctgaaagaaatatctaacagttctgtttatttgtaaattacacccaaataacttaacaagtatttatgtcctaacaacttgatttctgaaaaaaagaatacacataaactaaaagaaaaatgagtcccattcactgttaaataatcgtaagtgcttaatagtgagatgcatgagcctgttgggcactacgcaacttctcaaactctggcatcaggttggatgccctcacccttgtttcctgctccacactgattttcacatggtcctgttttataatacagcaactgacaagaacttagcttctcaaaggtatgacatcactgaaagaaagttatgcattccagtagtgaaactgtgaactaccttgagctagtagttcacacggtgcctgacagatgtcaagaattgctgtattttcctcaactatttaaaatatttcctggcacccctttgaggccactgcaatgtccagggtgcctcagctcacaccttgggaacccggaggctaattaaccatagtgaatcagattcattttctatgctactactgaaatatgaattagacaatattatagataaagctgaataatatgacttgttttaatacagttctaactcgattttctacttcaattccattcttcagccattgatatttggctttttaaaagctgtccttgtagtgtcatatggtcaccagataaactctgcagtgaaggctctttagattcaaatctatgttgaactatttcaattttatgattttttttttttaaaaaacagagagtaacccaaagcttaccaggtgatccttcttagtaaaagggatttgtgggctgtggatcagcttcccactgattcatctgagatgaagacaggaccctccatcctgcaaaaatgggtttgaaaaaagaaaggaactctccatttacacgtgagaatggctcagccctaagaatgctgcttgcaggttcactgttctgcatttagaatccaggcctagagaagcagcacggcttgcctctgctgtgaatcagactctatcttgtgttgttttagagtcatgtctacatagctgaaagatgatttggatctttttcaagaagagagtggtaaggtgaggtacagtgaggcagaagacaatgctggtcaatgctttaaaatcactctctgagaggaaaacccttggtttctactctctgctgatttctgtgttaaaaatactcccaccgtggttgaacgaggtcactgaattcagagttagggaaagaggcacacaatcagctctcacgagctgactctagcccttcactgggcagaacgcttttctcctcttctacagctgcccacggaatgctctgaatctaggggcgtactccgctgaaaggaagatttataaatgctcacgtttattagctcctaattgaggatatctgccagacacaataaataaagttgaaaaacagagtgctttggagagaaagtaggctaatccgaagctttttattcaggggatgaattctggtcttcctctctgtatatgggacactatcttgacctttctggctgagtctattagctcagaggtggcactccagtggtcaagtcaactggcattcatcaagcaccaaccacaggcttgaaatttatattagttgttttggaaggttccaggagaagacaatgtagactcctgaggaggggatgatgtaggtgaggagagaggctaatggcacatgaagcctgcaaaactgggctctagactcttctcattgcagcttcagagtaaatcaagtaacactgtctgtcttcccagaggtacccttggcagagaccagcaggatctgttgtttctactgttggacgcgtttatgggccctattggccgatttggcaagcagctttatataaaatgtcttccggaaccatcctttcccctgtgagtcagtcatcctcagagtcctaattctgtccagtttgcatcaggcctcctcagtctctgtagcccaaagcacacgatagggtaccaatgttcaaggctctgctttattttgaaattcagctggtgaagctattatattctacctttctccaagtagtatgcaatgcaaagtggcaattttacaccgtgctagcccaacataaattcacagatgagtgcacaccttatttggaataaagagaaacacaacagttattaaaggggtgattaccttcccagggaccatgaatttaaaattatgcaaaatcggaggtcggtctctacaagttcacatagtgatttaaatgggggtaacaatgaatataatatcttctaacatgttaaaacttccacagcaaacctcttatataatgctttgttgcttcattgatttgataagtttgtgggggtacattttgcattcatatacgacgtataaagtatcttgtttgctttacaaaaatgaaacatcaataataacaatcctcaggttgctatgatttctctgtcattcatactgagtgctcagtgtcaggaacagcatttgttttgcccttgaggaatttgcagagcagttagtaggtatcggtgtcctttgtagtggttcaaataacatataactatcgtaatatatttgaaataagccaattattatgccatttgaacatctatcctccttaagatatatcctgggttttactgaaggacttctctcttaataacgtttttctttatgatatgagcgtcctggctggaagagagctgagcttcagatacatggtgttggagtaaggagagagtcttttccctcaatggttatttgcatgggggctaaggagcctcctagttggggaggtgaacttgaactgtagcaacaatcaagattcaaacatgcatagacaagtatgatggcttgaagaggagactgcaggcagaagtcaggagacagggatggaaaagaagggtcactgtgagagaatctggcagggccaacagactcagccacaagtcagcaagtaaatggggagatgctgaaatgggtgaaatgttctccttcagtatggtggctggtgtttgaactcattttaccctctcttccaggggctgtgcacaccttaggtagaaagagctatacatgtgaactgaaacaactctctcaccaaattctaagacactttggggctcaaactactctattcaaactacccatctaaatgagcacagagacagaaaacgttttcctcacttcaacacgggctgctatcctgtcacggtaatgaacgacggaagaaggctggtggctggggccttctcataaccatgagaagaaacaataaagaaaaataggggtggtgtggtttggggtggtcaaggccaatgttgaagacattgatacagctcagaatagcaggcagcatccaatggtgagtggaagcccagattaattccaaaacacatataaaacatgtctacctctttgggaactcaaaaaatgtgaggttgggatgagctgcatgaaggactgcattacctgaacaaacgggtgagggcttgaggctctgggggcgctcgtctttaatgttaatgagactcattcataccatgggctggggaggcttggaaatattttagttacataaactgacatcaacccctcttcttcttttaattgatatgcagtcttagccctgttatcatctctgatcttgaccatttcccttagccactgggcaaccaatgtctccttctgaacagttgggagaaatgtaaattcactgttttttctccagagcagccagaggttccttaatttgcatcgttatatgagtgcaaagcatgatgataaaatatgcaattcttaagaaatgtcaaagacagctcattagatcaacttttttttctgtgtatttttttttctttttaaacagggaccactgtgcttcctttcaagtgacaagagttgtgacagctgctctataaggtattcaatggttaattaagacacgagtgtcattgctgagctcttttgtgtttcatagaaagcagttgctaaacagatgaaagtaggtctgaggcaaggggtagcataactattatttcaattaataaatagctctaaaagtgaaggaagtgataaagccctcaagagcgtctgtatctgccccggttctgtcaggaaaattaaacagagcacttgtgattgccattgcttctgtttaagagatccaagcaagtagggtcacctgtgctgagcaggttagagccggcctggttcttggggcaccccctagtgacatgttcctataccctaggatatccctttccttgctactgaaagaaatggtgctgaattcaccttgttcttccaccctcatcatcctttattctccccctctcttctaccaaagaagccctaaaatgtattttcagataaatatcaggaaagcatttataaatatttcagaggtgtttcataaataaatcagcaaatctacaaaaagacttctctcttttaatgagatcttgtctgtggtatatcccttttacttgagcatcattaaaaccagttgggaagatttttatactggactctcttttcgggggcttcataatatatgaacaagcctgctatgcgtctgtgaaacatgtagcctcttcttctgacagattaggcagccctggcgcgagggaatagcttttactctttttaaagtaaatactaatcaatagcaactgtaccgacaaaaaccttcttgctgcctaattgcaccacagctactcatagaccccaacagaattttcccctagatgtaacaaaattaactaccaggggctgagctagtgaattatcaccatctctctattcaaatgtaattaacacaaccccccaactaccacatgtaccattaaagtaccatttgtatgtgtaattttcaaacagggtctaaaggtcgtgcccacatcaatcttttcaacacacacagctgcacaggaaatcaaactggcagggaggtggtcgcagccattctaggaaatctctccctctctcagatattgtttgtagtttctcttctgcagcttaatgccctctgtggtctctttggccgtgtcagaaatagccagactgtatcagaggcaaacaagtgatttaaggaattttaggaagccaatctagtacccagccctggccaatccaggggctagctatgcagaaatcttactgatagcttgggatggatactacggccacggtggttaataataactaagatttttattgtacattcagattataaaaaaacttgtacctgcatttttcaaactcattattattattggcaattgtagtaataccaggggctatatattgagcatttgagctaagagctgtacatctatagtttgtcaattaatcctcataacaactttatgagttaggaattatttcctctattttaaaaccaaggaaactgaggctcagagtgagtgtgtgactcaaaatgctccaagcagctagaaggagggagcaccagggtttgaacccgattttctgactctgaggctcgttctgacacataatcactttgggagggaggtatcatcatcatcctcagccccccaccaacattatcatcatcaccaccatcatcatcaacatcatctgcctttcatacatgaggtaaacaaggtacagagaggtgaagcagcttgttcagggctacacggcacagaagagtatggaagaagaggcttggaggcaagataaaggcaaggggcagtcattggggattcatggaatagatgtctctctaaatgtctctcatgtcctggtggccattccatctgtcactttcaaaagtcagtggaaagagcaatgtaagaggagtcaggagtcaggggccatccactcagaccagacaccagctgggtgaccttgaccttgacattccctctctgggctccgtgctcttgattacataacaagctagattagaagatatctcaagtcacttccagatgtaacattttaggctcttcatttgtgaattattcgtgctagaagaggccatatgtggaaatttaacacagcaatactttctcaaaacttcacctgtaatgtgcctgttaggactcaggcacccatgttgtcacaaagccatctcttgataaaaggaggagccctgggctgaggatgcccacatttagcgttttttttctcagaaatactctgccactcccagagccaacacgtacaaatagcatttgctgcacaccctccacttcccatgtgtcatttggcaaggctgccccgcttgtcaagagggctatgcaaagtcaccaaggtctgtaactccagttagaactcaaacactaatttttcagcagcagagtctgttgtgagaaaccttgctcccaggtgcacagtgaacacagagggtccttctctaatgggactcccttgacttcttccactcaaagacgcctggttccagcctgtgaggctgtgcatggggtcagctccaatgctcggaacgtcccgcctccacccagatacacactgaccacatgtgtctggggctcctgagtttttctctgcccatagctcacccagggcatgagtgccttctgcagtttagtttatagttgatccatgctggtgaggcctgcctctgagtcagggccaccattagcctggccttgaggggacatgcaccttcatgcctgagctgaccgtagggtgtgtgtggagggggcgcttttggtgtccagaggcacttggcatcacattatatccatttaaatatgttttcccttgattctgaatgaactgagagaaacaaaaaatactaatcaaaatggaatgcaaatatccaaggctcctttctctcagaaaatgccctattttcccccctccatggtactaatgttttagaaatagaaggcacctctggagagacaggataataccaaattttcaaatctgtagaaaatgagtacaggggtaggcggcactattagtgctactaaaaataagctttgggaagctacagtaaatggaaaaaccagaagagtcattccttttttaaactgtactgaaaatcctgtatgttcaggagccattttctccagagattccaacaataatacttggaattcaatatccatttctacagtggtctctctcccattttgtccccctcccttcaccactgccccagtaatgcaggctaaatattaagcttattacccccacagaaagcgtggttctgccaactgaacattgtgccagataccaagaattgaggcgattatgccctgcatgctgcttggtatactgaagatgggcgttcttttactttatttttatttcatttcattttttttttttattaaagagagttctactgtagacaaacaacccagggattgtttgaagaaaagggatatcccctcagacctggggatgcatttctccctcagtggctaaacctctttgtcattattacctccagagagagacacccagggatctgctcacaccacccatctccaggcaagttgaagcatgtcctggaaagccacctgaaccctggacagctccgcctgactagagaaatggtggcaaaggaattcttgctgtggtcccagcggtgagcataacagagttacctctctccaccccaaatattcagactgcaaggacactggctcccaagcttcgacctgcttggagttccattccaggtactctgctgatgtctcggccagcctcagccacagactcccagctgagctgagctgttctgaggagtcaggaaatttgggggattttaacagagaaacaaagcctggcaccccatgtgtcaaagctctggatactagctctttagaacctaggtgggctaacgggaaaagtcaatgttagcagtaaacccaagatcaaaacttattccatgcctttccatcttctctcaaacatagcctttatcgaacgattgaaccctcacacacataaataaatggagaaagatgtactctgaaaaaaaaccatagaaaatagagtcacaagttatttataaaggggagatttgttaaagtagccaatctacttccctcattttataggcagagagacagaggaagagcaggttgaaggttctgaacaggatccccactaagcgtgggtcacattaggggacagaacactagcatgggcttttgcctcctaattcagcgttctcaccacccttgttgttccatagagcctctggaaagagagtggcctcaagtgggactggagtgaaaggccaagattgagaacgcctacctattttttacaaggtggtctggaatgtattattattttttttccttctttatttcagtctgggcatttttgcctcttaaaagcagctaaccctttaccacggaggtgatgcagaaatctactcatcaagtaagcctgaaagccctttgattcctgcagaaaaatctatatgtgcccttcagcctcataattgagttgcaaaggggaaaaataaaattgtttcctggctgtgtggagccattctacccaacatgccaataaaaagcaagtggtgtttttgtccataggatgtccaggttcagagtcagatccatgaggctaaacaagggctaggttattaccaacaaatgattacactccaggttgtattgaacagagtgagatatgtgaactcttgagactaattggaaggggaaatgtcaatgttgacatcccctgactggattccctaaaccacagtggaaactaacccagaatcttaaaaatgctggcttccagaaagccctattcttatcaggaaatgtgaatattaatcccaggcaagtcacttagccactactgtttttctttgccatcagatagtaatagccatctgcggtatcttttttcagaaaattatttggaagatcaagtaaatagagtagagcattttaactagtgaaatactcctcttattcaatcacagttattctctgcagtatgtggaagcaggttaacaccatctacctcaaaacaactttgtgaagttgggggtcccgttttagacatgggaggactgagactcagagagtttaggtggctcatctaaattcacaaagaacttagagagaaacagacaaggtacaaacccagattggctagttccatctcattttctccatggaatcacatggcttctctcttgatacatgcaaaatgcttttaaaggttaaaagagtgatactgtaacaactaattgaattcatccccacactgtcagtcatgtcaatatttaggagttcacacttctctccatggacataaatcatctttatgaggctctggctgttttttttttgttgttgttgttttttgggttttttttttttttttgagatggagttttgctattgttgcccaagctagagtgcaatggcgcgatcctggctcactgcaacctccgccttccaggttcaatgattctcctgctttagcttcctgagtagctgggattacaggcgcccaccaccatgcccagctaatttttttttttttttttttttttttttttttttttttgtatttttagtagaaacaggatttcaccatgttggccaggctggtctcgaattcctgacctcaggtgattcacctgcctcagcctcccaaagtgctgggattacaggcatgagccactgtgcccggctgactctggctgtttttgtaactacagtaagctcctctgtgacggaagctcctagttgtatctgattcactggtggactgatggaatgcctggactagtcttcaacacaccttctgctctcaaggccatttccacggccatgtttgagaacatcagatcaacccaattttctgtcatactcagtcagttgactttactggcggacaaaatagatagttgccttcctgttgtgatttctaggatcttaggggaaagcccttcttcttcactacccttctatcccttcccttaaggttttaaatccttgaatgaggattttaaaaatcattctagaatgaaagacaggtttaaagtgcaaatatattaaaaagccaaggacgcattctttaatgagtaagtaaaatactaagcaattcgttttgggagaaagaagggctaaaagagaaaagtgtcaggtaacggatttttgattttttttttttttttgaaacagtctcgcactgtcccccaggctggagtgcaatggtgcaatttcggttcactgcaattgccaacttctgtgtccaagtgattctcgtgcctcagcctcccaaatagctgggattacagacgtgcacctggctaagtttttttttttttgtatttttacaaaatacaaaaaagacagggttttgccatgttggccaggctgatctcgaactcctgacctcaagtgatctgcccccattggcctcccaaagtgctgggattacagacattagccaccacaacctgcccagtaactgatttgagggaaggtcacagaggtggagaaagggcacaacaggcatattagaaactcctcagtttgtccaatattttgcttaaggcaatgcctgttaaactctctgaaccagaccaggtgcagtggctcacgcctataatcccagtactttgggcgacccatgtgggaggattgcttgaggccaggagtttcagaccagtctgggcaacatggcaaaaccctgcctctacaaaaaaagaaagaaagagaaaaaaatagccagatgtgggggggctgcatctgtcgttctagctacttgggaggctgagatgacaggatcgcttgagcccacgagttcaaggctacagtgagctatgattgcaccactctattccatccagcctgggcaatagagggagaccatgcctcaaaaaaacaaaacaaaacaaaacaaaaaaacaaaaaaatcaccacctcgccgggcatggtggctcacacctgcaatcccagcactttgggaggccgaggcatgtggatcacgagatcaggagatcgacaccatcttggctaacatggcgaaaccccatctctactaaaaatacaaaaaattagccaggcatggtggcaggcgcctgtagtcccagctcctcaggaggctgaggcaggagaatggcaggaacccgggcggcggagcttgcagtgagccaagatcgtgccactgcactccagcctgggtgacagagcaagactccatctcaaaacaaacaaacaaacaaacaaaacaaaacaaaacacaacaaaaaaaatcaccacctctaggtgctagagaaacagtgtttggggaatccattaacaggtgtgatttaaaaattttttacaactgctttactgaggcatagtttatataccacaaaatccacacattataagcatccaatttaatgatatttaatgatttttagtaaatgtatagagtagtacaaccattaccataatttagttttagaaacaagttcaatttgaaaaaaatagtgctttgaaaaggtatcactgcttgcccattatagcactatagggtttattcttactgataatctgcctaaagtaggctccacaaaacactgggtaagggcagccacgctttggaggacttcctctttccctggcttctgagtgattatgtgctgggattcaggagtgagctcagagctcaccacctcgtgctcaggctcagggaggggcccttggtgtggacatggaaatccctgccatgtccatagcctctatgctcaccacctggaaagttacagagagctcccagttacacctctggtttctagagccagtagagcaagcctgtgatcagcccctccaccccagcctcctacagccacctctcccaggaaagcctagaggaaattggccaacgtcttggtattccattctggttgccaagtgcccttattgtttttgcatttctaagagactgtcagtacaacttcccccgtgactgccacgtgacaggctgtgctgtcctttatctcagggcaccaaatgacttacttcattccaggtctttctgtttcactgtgagtcaggtggaaaacagaaaggtggccctattttaagggaaatgttaaaacaaagacaatgctgtgctttgctggcatttgttagcagcagacacggttaaagaatggctatgggcaaatatttggatgactatagaatctgcttaaatactatggatttactgtatagggtgtcaaagtaacaactgtagagttagagtctattaaagggggtctcaacaaaaaatatttatgcccttatatgcatgctgctttgtcttttgaaaattatctttcctgttttttccatctcatagttccctccaaacaattgaccactccttttgccatgtcactgcttcctatggaactcagtccggtggattaagtgtttctgttaatgtctgtctccctttcacactgacttttgtatgaaagggaccgtgcctcttcacctctgtaactctagtgtataccatggtgtctggcaatagatgatctgcactccattgactgggaagaggctgtgaaaacaaagacgggtgcacgttcagagcaaatatttcctgctttggctgtgctaatttgctgtactttacacagtcagggaatgatgtgtgatcatttgttgaattaagaaattgttttggactcaagaagcaccaaatgtaaactgcaatgtcagactgcgagagaaagggtgggaggctttggggaaagggctttcccaaagtgcttgcccatggggaggtgagggggaatgcaggctcctagccacagagaatgaattcattaagtccaccaccatgctttgtgagaaccaggcagccactcctccttacatacaaccccagtcagatctatagccatgacaagaaatacaaaggtgtgctttctatttgtggtttatggaattgccttcgggatttgacttttatctaccatgtccactgttctgcctccaagacctatcacagtacttggcacacagaacgcagtaaatatttgtgatgcaaatgaatatttcatagtccagctggcttctttcccatgttttttttctttaactgtgcactaaaaccacagtgtcccggaataaattttctattgaacatctcacttgactgggaagtaatctgtgaatgtgataaagaaatggagagcaaatccttggaaaccaaggcttgggagttccatcatttaggaaacaaaagcagtcaagactaaaaatctcagacatcgtaaagtgattactcaccttctgaaagaccccagaaatatcagaggacaccgggggtcagtgggccatccaggaagaagctttggtgaaggggagggcactaatgtttctttggcacttattgggtattgggccaaatgcttccacctttcatttcggtactcacaagaaatcctaccagatggtcatggtgatcatgcctttccgaatgaggaggggagatcagagagactatctatcatacccaagattgcccagctagaaagtagccacaccagaacttgaacactagcctatctaattctaaaaactcagctttttccagcccaatatgttcctctggattttaagtcccaggagggcagaaacaaggctatgggcagttatctctgtagcctgctctccccagcatgggccagaagaagcatcaagacatgctttctgagctgcatttcagatcatgagcattgggacttctttccccaataagtggtctgactgaatcctggccactgcctccacaggcactcacctacagagtgctggccctggaggaagttctcaggcagcactgattccactgggggggcacaggccccagtgcagaggaggggctcattcttaggcacatcacttctcctctctggacctcagttactcatctaaattgacatgatttgccagattgtttctcggcattgtcaaagtttccatggtggcgcgaatactctatttctgcacagtacagtacgttcaccactagccacatatgcctactgagtacttgaaatgcggtatgacttaagaactgaattcttaattttatatcattttaattaatttagatttacatttaaatagccacatgtggctattggctccattattgggcagtgaaatgaggaagcttcggcttgaagaagtggaagaggaagcagcataagatcagaattctagctcgctcgaatgtgggttcaaatcccaacaggctgtggggccaagaacaacatatttacactcttcaagtctcagtttcttcttctataaaatggagataataatggcttccgcatgaatttgctgggaagattaaatgagataaagcacttagcacattgcgcttcacataataagggctcctacaggaaggctattagaaaaagttcataaaacagcagagacatgggggtgtttctttccctgattaacccattatttcactcaccaacatgtcacatctcaaattgactggaaggaaagaaaggtttaaaatccactgggtggggcactggagggggaggtgaggagtgatggagacaaggcagttctgccgactttacacttttcccagggctgttcctgtatgtgtcgtttgactgattgggtcaaattacacaagatctagctagatattcagattccctccaatgcgtctgtgttgtgtaatcctccctgccttgtaaaggaacagatctgattggccagggattgcacaggtggcaacttcactgagattcacaatgcattggaaacaagggaagagaccctggtattctatgacaaacgtgcagacagtctaaaacatcaggacaacattttctatgtgatttagctggtatttctgagctggaataattaaacagagatctatccacttgactaaaagaggaagcagtcgatgaggaagtcagtccctagctccctttgccccgaaatatgccaattctgaatatttcgcatcagcttcctcttaataaatagcttaccactcatccatccctcgaaaatatcattagaattgcctggatatatatatatttttaaataccaatgcccaggccacatcacattcaattaaatcagaaaaggtgataggtgagtatgacactcaggcatcaggcatcagtattttttaaagcccctcttgacccccaggtgattctgacatgcagctaagtttaaggtcaagtgttagagatcagggtagaaactcaggagttaactgcacggtgagccctgatctgtatcacacactcagggcctaatcagaacatgctgatgtttcgcttagcatacattgcttattgcaactagaatatttctcaaccaacatccttcttaataaagtctaatttgggccagttctacactgttagtgttgacagggaaattccccatcgcactggtgatgggagggggtggtgctttcaaatcaagccttgaagaagtatccggcttccagagcccaaaaccctcaacagaggagctgcttcaacaacttctgcatactgccacctggtggggcctggacccaacttcatcacagctcttcagccttgggcacctacccgcctccccaaacagatgtaatttaggaaaatgtcatgcattttcaatccaatttactggtgccttccacattgatcagacttccttctcctttttcctcccatctggttaatataattattgcttttacgtggcaaagccattttatgtaatagctttgtttgttactatggttacaagtttagtagccctttggaatataaatctatcatccctgaaagtagctttctgtgtgtcaaggtgcagcccttatgtaaggagagtaacagcgttagttttctgtcgtaaggaaagtggcctttcttggtcttatttttgaaagttctacgagcctagcctagacactcccgggaaactgctgggtgctgtcccactttttccctctggaattttcctaactgacgaggcatccacgagcagctctatctgggagaaagtagggaaacgtcggccgaggggcagctgtgtttgctgggccagagccctcgcattgcataactggtgtttttcctggtcagtgtactcttggctgatttatttaccagttaaaggcaagggctgagaatataatctctcaggagttaagtttctttgcgtgtaatccctttccctcacgcatctgaagcatcggcccttatttcctgatggaagtggagttataatctccctttggaaagtggtaagagttcagtgctgggttcaatctgccaccctcaagtgacaaagcgtgacagcgtctctgctatagtgcttcacacccaactgaatcagacgcagccctctgagcacaaaagtgggatggcctgtgaagctgggctttcttcccattctcagccagtaacagcaaaccttggagagtttataccatgtgtccctgtacgtaacctcatctaatcctttcgacaaccccaggaggtatgcattgccatcaagttggcatcactcccattttacagagaaggaatttgaggctcagaaggattaagcaccatccccaagtcatataactagtgtgtgggacttaatgtctttggaaagtcctggttgctaacttaacagagcctcactttccagattcaaggaaccatgagaaaacaaagagcaggcagtatcaatgccttcactaaagccttgattaagccaaactgaacaaacatcaacaatcttcttccctcttcaggagaaagttactggtttggtaggccattagtgaatttccagtggctactaattaactaaccatgtcattcatgtttattatcacagagcaggtacgtatttatttacaccactcacacggcaggataatttgcagttatataatttcatggtaattacgattggaattgccatgtagaaactgggcactttggagatgcatgattaccaacaactagctaccttggaattacccattaatgacatgattagttgtggctttgtaagaaaatgttgttatgaaagggactttatcttttcattcccaattgacagaaaagcaggaaccttggagatatcagaaatattttttttcttcttctggcaggtgaagaatgtagttgtgcaggtttgtcctgtttctgggcatgtctggggtgccttggtgacagggagggagcagaaagagatgtgtgagcttgagcaaagggtgcaggccctgagctgtaccaggctagtcttcaggtctgttgagccagggtacagccaggaattaccaacttgttaggcagagagtaaggaagctcagaaagcccgtgcttgagctaaggggtacgaaacccaggagactgaatgactgcctgtcctctgctctgtggggaccaagagaatataaggaaggcagaagcagaggaggtggtaggttccatctacttatgatgctacgaaaagacatgcggcttatataatatgcactaggcatgaaccaccctgcccccaaatacaaaactggtctccagactgtatttcttggcaacagtggcctccttggcttttcctccacatccccttgagttgactatcctctgaggttgctcttgctattgattctcactggatatcactgggcatggggaggagaaacccacacaacggggtgcctggcatatgaagaataagagaaactttagctcttagaactgcaggagacccctcgtttaatagaggagaagcccagggcccagcaggggtgaaggaaggtatggtccaatgtcacaaagcagataaatggcagagccaggcctggagcccacacaggccacctccgagtgattttccataatgcaattccttcatgagggaggagttgttgatgcctcaaaattgagactaggctactatagataatacctatatagggagtgcctctgcatccattatagaggctactctgggatatttaaatacatattttttacctgattacggcacctatacaaagactcctgtatcacattcctttcactggtcaagagcaggcagacatttgcacctcctgacctgcaatgcccccctactaatagataatgagaaatctgaagtccacactgattcccttttcctctagctgctaggaagctgaaaaatccatcttttccttaggtaggagttttcattacggttttcttttcctctcttttgcctgatatctgcttttgttttatatattgttttgatctttttgtacctatgtttttagtataaaatttctggatgcaggtagggctgtcaactaatcaataacaaataaacaaataataatcttcatgcttggtgttcaaccatgcaggaaataaaatcttatagaacgtacagaagagccaggaaggatcacacactccactgtgctaactgcatacgaaggagaaggggaagaaggctcagttttagtggaaaggaataggaaagagaagaggcctcttcctttatcagctccctcacagcttcagcagcactatctcaccccactaaccaaacatccaaaggacttggaggcagaaaagaaagcttccggagaccttggaattatgtatgcatctatctatgtatctatctatatatctaagtatctatgtttctatctacgaatcagccattttatcttccacctctatcatctaagttaacctttctctaatatttctctaaggctaatctcatcatctttgtcttaaagaagcagactcagaattaagtaatgttttcaacgtcaaagaataagtagatctgggatttgaacctatgcccatttgtatgtgaagcccacattttttcctatcatatcacccacatcctcagaccatggctgtcacctggaactgtcagtaggccacccattttaggtctctcttaggcctaaagtcaccaagctttaccagtacccaaactgggtgctaggaacaacaggctgggcactaagatatgacagatgtggattaccacataccccagggagaagcctacataccatgggttcatagttaacagcgagctattacaatagatattgttcatcctcaaagatgaaactgtgatgagaccattgctataatattgacaaatcttcaggtacaccaaatgtgaagatgaattttattgaaatcttcataacatttttccatttgctgatagtttaaacaattatgttcatgtttctctctgtgagatgacttttggtgtcctgaaatgacatgctattgtgtaaaactacagatgcaggacacctcagtggagttcttttcttgcattaaactcacttcaaggaagatttatgaagccttgaaggtctggattgggccttggggctcatgatcaacccaggaccagaatatcaaggcctaaattgcagtcttggttctacctcatagcctcctaagaccctgtgttattctccagtcttatagaactaatcacataaagtggttaatttcttaacctatttgtagagacaaatgggtgatagaaagaaaactggagctcctggttcacatatgcctaccccatgcccctgcaattccactgccaggatatatccaacagaaatccatacttatatccacctgaggacatgtataagaatattcacagagccactattcataaaaaccccaaaatggaaataccactaattccatccctaacagaatggatcaatcatggcacatttctaccgtggaacactacatagcaatgaaaaggaaagacccattgcaggcatcaacatggacaaattctatgcacagaatgttaggcagaagaagccgtccataaaagagtacatagcacatgattcaatttaaatgaggttcaaaatatatgcaaaagtcatctaaggtgctagaagtcaagacagtggttacctctgaggaagggtagtgactggcaaggtcatgaggtggttttggagatgctgatcctattccatttctttatgtgggtataggcgatgtgttcacctacaaattcattgagctgcacaaatatgatctgtgcacatttctttgtatgtgttatgctccaatacaattaaagaaaaaacagggttcaattcccatctctgccactcaccatgtggcttttggaattcactttacctttacgctacatcttcctcatctgcgaaaccagcataatacagttcactaacagggctgctgtgaggatctaataagaagctgtgtataaaacacctagcactgaacctcacacatggtaggtgctcaatatatggtcattcatttttaaaattttaaaaatgtgatggacaatattgaatatacacaaaactaaagagaatactataacagacccccatggaccccgtcactgagcttcaataattatcagcctatggccaattttgttttatctgcatctgtctccccaaccgttaaaaaatatatgcacagtctacagatatatgcttgtttttgcatatatacatcagtttgcatctctgagaaataactcttttagaaaacataatttaaaaagatcagtggttgttggggcttgggggagggaagggtgaataggtggagcacagaggattttgagggcagtgaaactgttctgtataatactatcatggtagatacatgtgtttataaatttgtccaaacctgtagaaggcacaacaccaagagtgaaccctaacataaactatgcaatttgggtgataatgatgttggttcattgattataacaaatgtgccactctggtgggggatattcatagtgggagagtggggggaaggggtatgtggaagctctttgtaatttctgttcaatctttctgtgaacctcaaactgctctaaaaataaagtctctttaagaagatactcacatccatgatcattaaagactactgctactatcctatttcttgtccagttttcctaactcataaatatattttcacaactgttttgctcaaatcaagatccaaacaaggtatacttagtatgcatttcttcattcttaattaattcaatgtcttaacaaatcacagagtcaatagataggaaagctgtttatgactttggccaccaatcacataatactttgtgaggagagaaaaaagggtattgtcatgaagcttcctaaaaacacccagagtttctgtctgtaacactcttctgaattctttagaaccatggatggttgctgtcactgtcaaaactacatctaatactataaaggaaagaccctttaacacaagactgtgaatacaaatggcagagcagatactattgtcacacatatatgcagaagagattctgtaaggggtatttccgggaagacagacaaggtgtgatatctggtgtcactgtgtgtatgaaagaagcattttaagatcctcaaataaacataccgcccaaattaaggtgaaagtaaagcagacaggacccactttttgcactttgtatcttttctctctgctctttcagcactgcccaaagaagctgtcgttttcatcttgcacacaggatgccgtcctctgaagtctgaacaaaggccggatcacatgcctaagcagtattttaccttgtgctgattccttaaaaaaacagattgtctcctggattgcatgcatctagaagttcttaccacgttttattaaacaaccagctaatgcttctgcttcctctaaggagatcatgagtccccccactcccgaacaaagggccttcattttattcatctgtgtattccacatcccagcacagcacctggcacatagtgggccctcaaacaaatgtatgtgggataaatgaacagatgagagtgaaaagaggctgtgacgaaagcactggacgggaagctggagacctgaggtcatctaggcccctgacactcagagtcacttgagtcaaggcaccaacttccgtgggcttccgatgatttctagggtctctcccaagtctttttaaaaaaggcacataatcctaaaatgtgcttacttactgctttgctgtgttgatccacctagtgacttatatctaaagactaattgctaaacaaattactgaggcctttccgaacgctccacagcaacaaaactttgtttttcccgttgccccataccttctgtgtcatttatgttcccactacagatcacagtggcaacaaccccacccagaagagccaggaaaaaaccctcccctctaactcaccatagggcttgccatgtgctagctgtggttctgctaagttgtgctggaagctggagtgggcaagggctcagaagccttctctttcccccttagtccatgcctggccctgctgtgggcagagctacgatgactgaccatgatcatgtgtgagcacggggcagtgtgttttaaggggtgagcactggcagaggtgggtccagaaagggccagcccactgaaaacttcccaagtgggtgaaactcaccttggcacttgctctcctctctcctgccctctatcccataccccatgtgtagcattccattcaagaaaagaactctgactttcagcttgttgacaacttatctcctgaaggtgttagctgacaacttttctgaggcagaagatgtgaccaatataggtgctgggagaacggaaggaaggggttgagttacatttattcagtactttttcactcatttaaaactaagcacacaactgagaggagtactcttctacttttaagaaatgttcttattgtatcactgccgctaatatacgcttatagtctaaaaatatagaaacagatttgaacaaagaagaaaactaaagttacacatactatagtcctttaaaattttagagccttctagatcttttcatatatttataagtgaatatatttcttacgtgcctgtaatcatacttctgctcatccgatttaatgtaattctattgtatctgtaatggaatagaaattcttgtccttggataagtcactggccctttctatcctcagattcctcattaatcagtaaagcacgaatacacaggaaaattaagtcgtgaagcactaaaccacagggcggtgcgtggaggcagccaggccatgtggtggaaatactgtgaactataacaaccatagagatatgaggagtgattattgataggacacattaccatttccaaggatttaaaggtaatcaggccaggcacagtggctcatgcctgtaatcccagcactttgggaggccgaggtgggaagatcacttgaggtcaggagttcgagaccagcctggccaacgtggtgaaaccccatctctactaaaaatacaaaaattagctgtgcgtggtggcacatgcctgtagttccagctacttgggaggctgaagcaagagaatcccttgaacccaggaggcagaggttgcagtgagctgagattgggtcactgcattccagcctgggtgacagagcaagcttctgtctcaaaaataaataaattaataaaataaaataaaataaaataaaataaaataaaataaaataaaataaaggtactctaacaattgaggaagtgcctccttatcacatcctgacaggcggacccttgctgcagccacaggtgtagactgctctctcaatggcattttttgaaagttgtcagtttcttggtgctggaacctctcccagctcagaagttgtcaccttcagactatctatcttctctaaatgggattggcttcgaagagaatatttgaaatgtccccatattcaaactgaaaggagacaggctggaccagtaagaccagccaagagatgttgagttacacatattgtttggggccacagagccctactctgtttctcctccacctgtctgatcccacagtactaacaatacattgtctgtaggcccagttgtaaagactctcgcccctgtggactggctgtcctcagaggggagtcagggaatccccagcggggctgtcatggagctttggcccagcagccccacagctcactcagaaatgcactgcatgcctgatacagtgaatgatcatcagaccggccattggcggctgagcactttgcctttctgggcttccgtttcttcactggaagcatgagggtgtggaatccaaggactatcagaattccttcctgcccagatgccacgaacctgtacgtttctgtccatttttgtgttctgctggtactcaggacagtgcctgtaataatgcaggtactttgaagtatctgttgaaggaatgggtgatgaataaatgggtggaaattctgtgcttacgatgagtggaaacacaacggttggtgggaattaaactcttaacacatcacatggtgaccaaaaatgctgaggccatatctggcctgcatggtctgacatgattggaggcacccctgaaggtgggaggatagagtagattgaatgagaactgctcttgaacaactaggatacaaggctgctatatgaggggccagaaaagattgcatcagggcctggagatggtaacattcatgacaggtatacatctatggttttggaggcatctccatatctgcatttcttataagcttgtgcatatagtgacacacagctattcgaaagccaaaagtccctcaatccaatgacatttggaacagaacctggagcataacctggaaggcacctgcagcagaacctggaaggcaccctatctgacctggcatcagctgacacctggctgtctacagctttccataagcccttgccaaagtctcacactccccaacaggcccatggactcagcagtacttggagaccgagtcactgggtagattatagagttatcccagcccccatcttgctcaaccccaaccttgggtgcattgacttcccagtgaaacagaacatcgaatgacattttaagcacagtggtacatcttctcagagagggtatttggctataatatgctgcaaactttaaaatgtgcatatactttgcctctgcagcttcatttctaggagatcatttgagaaatgcacaaatatatatgcacatggatgctccttagtctcgtttataagagaaaagctgggaacaaactaaatgtctattactacatatcagctgaatacattatgatttactgatgaatgaaatatcccgcatcataaacatgacgcataaaaatatcacaaaagatgtccacaagctactatatcattgactaaataaaactgtctatatgatgtaattaatccatgtatgtaagtacatccagatagactgtacagagagagatgactggaaggatcctcatggaagttttaatttactacctggctcttgagatttggggtaaattttcctctgtgcttcctatttttctttacagttggaacacttcatgataagtgtgttgttgatatcaggaaaaaattattatcattttgaaataaaaaataattttattggaagccttggaagggaaaaagagtggagatctctccaaacagttgaaatgaatttctaagcaggtgcacgctagtcacacacatccttcccacctctctgaccagataggaagtgctcaacacatgtggaccagttccctactagctgccaggtaaccaatacgtgaagcaaaatggggattctacaaagtgagagtcctaaggaagctctatcctatgcgatatggaatggaggcaaaggatgtgtcctactgtcatctgtaatgttcacttcccaggacccagccatatacttggcagtaagtagctgatgaacattccaaccattattaaataacacttctttcaatttcgaatatagtctttgcagcttcctcttccttcctacttctaactacaggggaacataaaaacctgaaaaccgtctgactgtggtggctcatgcctgtagtcccagcactttgggaggtagaggtgggtggatcacttgaggtcaggagttcaagtccagcctagccaacatggtgaaaccccatctctactaaaaatacaaaaaattagctgggtgtggtggtgcacatctgtaatcccagctactgggaaggctgaggcatgagaatcacttgaacctgagaggtggaggttgcaatgagccaagatcacaccactgcactccagcctgggtgacagaggaagactctgtctcaaaacaaacaaacaaacaaacaaaaaacactgaaaaacctaatccctgcagaatgcaagcgtcagattttgagaccattcagtccgatgttctcattttatagagcaggatactcattctggagaaaataattcaagttggctattgacagtgtctggattagaaccacagtcttccagccctgttttctcctcaccttcctcacagccatgcccttgtttggggcccgtgctttctcttgtttggactactgcaacagtcatcaagcaagattttcctcccatcctcccatcttctccaggtcacattccctggcactagagaatctctctggaacactgaactgccctgcccatatcttttccctgaataaatccctttaaatgttcctcatagactccaggacaaaattcagactcccctgcatctcacatgagccttttgcaacatattcatggaccacagtggcaccctgaagaaataatctttcacacacaacagctggaaatacttcatgttcctttattgtcaagtaaatgagggtttcttccaagggactatcctgtaactacttaatttaaggattaactaaaacaggaagtgctaatcagctcctgaaaacacaaccaacattctaggcgggaagctcgtggaagccaacaacaaaagcattcgcgctcagtatgcctgccttccccttggaacctaatacatggtaggacctcagtaaacactacttgccaaatgaatagactaagtaataatcagaagtggagaggttaaactaatacaatgggcagtgaaaagaaaagctgtttttcgttttcttataccccttagaactgaaaaagactctgagtttgtccaattcgactccctcatttcacaaggaaggcatctgaagctcagagagacaaagtgaccgccctaaagtcccacagcatgttcatgggagagttaggactgtgctgggagcttctgatggtttccactgtgccatgctgactctccaggcaagtctaaagtaatgctggcaataatgcacagagctctaggcacaggctcctctggaaggtgccagacagcatacaggctggggcaccaggtgtacagctaatcatccccagagaggtttacctgagcttccaaagggtttttttcttttctttctttcttcttcttctttttttaatcttgaattgtttggtgaagagtgtctcaagccaaggagcagacacacttgtgtgccccgctcccactcttccctcctttgttcttttctttgagctgggtccattggaggagcattgtatggtgcccctgctgggtctacaaggcccctttttggttcaattaatgagccataaataacccaatgaaggtgtcaacaaagagggtaatttatcataccttgtcaagacggcaagctttgtgaggcaagcgctcattcacagtctggtgcaacatgttaagatttattcctggccaggtccctcctcctccagccctccctccccctatcaaaatttatctttcacaggaatcctcacaggtgtgctgctttgacaaataagctatgaagtctggtattcatcactggctggtctttgttgagaggaaggcagcgggaaataaatttatgttagagggaaggtacttgtgattcaaacacactcaaggggagcaacgaggttatttccatcctcctggttctgcaaaaggcgagaaggagataatgctaggacagccactttcttcagtttttactacttgatggaagaacagccaggactttactgagatgcgcacttagctgtcagtctggaggctccagtcgcattctcttgaaaatgtttggttgggaaatcttacagtggagtagaaagtgctacaagacatctgatatgcccagaatcgccatatcaggaggttttcccgcttcgctcttcaacttctggcttcccttggagtgctcatcctgaagtgtgagtttgcataatagccatctgggagtgcttgctaaaatactgattcccaggcctcccctccagcccccagagatacggacctgggaagtctagggaggagcccaggaatgtgtattttgacaagctcgcctctgttcttgccttcagacgcatatggtttatggagcacattttggatcaacacgtgctgcttagagtctctggtgcatgcctctgaactttctgcaatgatggaaatgctctctatttgtgttacttaatactgcagccactagtctcttgtggctgttgggcccttgaaatttggctagtgtgagagaggaatggaatttcttaatagtatttaattttaatttattgaaatttatatagccatgtggctagcggctaccattttagatggtagagctctagcccatcattctgcatagtagatacagacgaaaaagctcaacataagacctgatatgccagtctcctcctactctaccctattttccagctaagaaatactccaagtccctggagtgtgccctatttagtcatttctaaacaggaagagggaggagcatatcctcccacctccattctcaaggtctatataagccgagagacagaaagatccaatttcttaagtgccttccatgtgggacggtgggaggcatctttgagaattacatatggtctcccaatacagggagggaagacaaatatacaagtgacccaacaccaggtggcccactatgaagctgtagaaaacacctatagatgcaaagtgccaggagtcctcagcctcccctagcagatgtgaacacttccggacaccagccattcccttcccactttggaattaatgcaacagccttgtagctcattatgcccaattcactgaaggaagttagacttctgaattccttccttgaagtgtccaaggtaggtttcccactgtctgccctgttgagatgggacccacctctgtggttacactttgtatgtggtgactgtcatcacctgctcatctgctcacctgtagactttgaggtccgtgagcagagattcccaatcatttatctctgagccaagagaccgaccctggtggggcaaaaccagtatgttctaaaatgaaatggcctcacatctgcctatatgaggcctcttacgtcttgcttaaggataaaagtggcccttgaaaaacagaaagtggtctgttctctgagggtaaaagggtgtaggtgttccctttctacagtgttatgagagggacttaccccttaaatgtgtattttaaatggcagggggaagagggggaagaccacatggaagagtgactggtccagggtctggggaagaactccctgtctgtgagaaaattccacctgggaaagagaaggtgagtctgcctagagcagcagataggctccaggtccataagtggggccaggcaggcttacaggagtaggaggcacggaggcacattgggaggtaggctgttcactgcccagaggcacaaagcccctgtcccagaagtgaagggcagcctacaggcctccactggatgccctgccacccacgaacagcccctccctgcccaagcactcttccttactcactcctctggctccatggggaagcagaatcccaactcatagctgcaggaggaatagctgaagagagaagaggcctggcttcagcttccagagctaagccctgccaatctcccagactcctgcagtctttcaagtctccgacatttgattactcctttcttctcatgaagtgtccttattttgcctctagaaaacaggcactggtatcaagagttgcatggctgatgccaagacttaatgctccagagtgtcttgcacagggccaaagctgcctcttctggcacacacagagttctacagaagggcccccttataggccaccagccactgtgaggacctcataagcaaatgtaagggcaggaagagatgggacatggtctggcaaaaacctcagccttctccctaagctcttctgccttatgaggctgatagctcagactcaaaacagttggctgagttctccagctaaatattcatttctccagctaaatattgattccttcaatattaacaccatgtcagggagccatgttaagccattgcctcaacttggcactgcagctaaacataatgaaatgccagaaattagggtctagaattgattatggtaccaattctaatcctgaattctcaaagcaatatctagaaaaatattgaatcaagagtttttttttttaaatgaagatcctatactggagggagatgggcaacttctatttggaataacaagcagtatcaatgtctttgaattcaccttgaaaaccaatcctttggagtagaaagaattcatggtatttgaaatgtccaagattactaatgaggggaaaatctgagggacctgagaaggtggggttgcttgagaagcagtaaagcttctcaaagaagaaatggagatgccatgagcagctgccttggaccagattccaaggcagtgtcttgtaaactcagccacgattagggctgggtcattctggaccgtcctaaagagaaaccattaaaaaccattaattccttcagatatcacagctgcttactcatagtagctcattcataggtaaggaaactgagatctccctaagatcaaataagtaacaggtatgttaaaaagtttcatttgtttacgtgttactaccaagggccaagtttctccatgtagtgcaaggaaataatttctgtgcaacagctcgagatatgcagcttgagtttgcctgaagccctggcactgtgaattgcggctccttcagatcttgcaagctaccagcgatttggcggggtgggtaactggttgggaaacctcccaggaaaccacagctcctgcaaatgactcagtaggtggttccgacttctctgagtcagaaccaagcccatggcccagccccatgccaagactccctggcattgttgagatgctctgagcttggctggcatgtgacactgaggacctctggtgtttgtctgcaaagggatgaatgctctttctgataaggaaccaaggagtgtggaacagaaaagcagctgaattctctcagtggcctggctctctcttgccccctcaatccctgaagagtgttgatggcttcctacgtcagacaacctttcacttaaaaacttactcctcttccttacccaggagtttccaggttgccccccacagtcatgaacttgcagacacagaatgcttagttctagtattgattctgctgcttcccagggctgtgaccctgagcaagtctcctactgtgggcctcaagtattacccatcccaatttcatcatcagcccaattgtcctctagtgccatgatgatcatactaatcttccaacccaaattctccactggctcccactgcctatggaatcatgtccagacttcttagcctggtattcaaatcccaatctatcttttaagcctcagcttcctctattattctccctgtagcctacgttctcagcaaattggaccactcactctccctaaatgtactgtgcatttcccattccctgtgcccttgcagtgcccttttcttgagatgccctctccttgcctctggaaattttgcctacgcttccaggctcagatcaaatgcgacctcctcctccaagcagcttccgcagctcttctcttgtgaagcccccttgatctctcacatcacagtttgttggtaccttcctattgacatagaacgcattattctgaatcgcaggcatttgtgtggatgacttctctctcctcctggatggcatactcctaaaggaagaggggtgggggaggatgtcttattcccctttcaatttcccatcatgccagggtatacacatctgtactaatgaacaaatgaatgaatttagaaaatctagatggatgttctaaaattatctacagctgtggtatttcataccagaggtggctgcacatcagtaataaaaaccagcccagacacaagcttttcatatgggaaaaagcagaggcactggtgcgatccattctgttggccatgaaatgtctttgggtgtgtgcacacagactcccacaaaccagatgcaacatctgcttttgaagggcccagagaggctgggctccctcatttctcaaagtgatgagaagcgcattggagtcttgcagctgacagtcgttcggtaaagaaacacctacttagcatagccccagctccagctccacaccatatgcatcaataggggtgggtcacagtgccctcttggcagtaagccaggaggagatttgaggtttggttttgctgtgctcaacaggcagtcctgatctacattaacaagtctcctgcttccgtgtgactagctaacaaggagactgctgcctgcctcatgcagggagacctttcccaaagcttggcacctgccctatgctggcccagtggaggccaaatgggggagcagaaaggaagacattgctaaagttctcttttccactttccttcaagagactagaccagtattctcaaactttagcaagggtcagagtcctctggagggcttgtaaaaagaaaaaaaaacaaaaacacagattgctgggccataactccagagtatttgacttagtagctctgggataaggcccaagagtttgttgttgttgttgttgttgttgttgttgtttgtttgtttgtttttttctgatatgaggtctcactatgtgacccaggctggtctggtcttgaactactggcctcaagcagtcctcttgcttcagcctcctgagttgctgggattacaggtatgagtcaatgagtcatcacactggctcaagaatttgcatttctaacaaatttccaggtgatgctgatgttgcctgtctgggagccacactttgagaaccactgtattggctactccaaagaaaggcaaatgaaagccctcaagccatcactggctggacaagaggtatgactgtctccctgcctccaggctctgctccattacaatctgtcctctactttcccacagaaagcacctttctaaagcacacatccacctatgccattggctgcactgcctgttccttgcctataaaatacaaactccacagccaagcttatgttgtctaagccgttaactgtgtgccaagcactgttctaaaacctctacacattataagctcatttaatccacataattctatgcagtaggtactattattatccccattttagaaataatgaatcccacagggggccctcaggaaatattttctgaatgaatgaataaaaagatgctcacaagcatttacactgtgtactacagaggactatttccatgccaaaggaaaccatcaaaaagtgaagaattggcttgccaaccagtcatttgttcctgcactacaccaaataacccatttgcctgtaattggctggatattctggctttgtgtagacatctcctcgctgggagaaaagccagagttaatccttcacaaagggttgtttaataataaccagaaactggaggagagcagaaaagaacacagtgatcccacacaagctgaggaaaatggactgttcaaacccacagtgtccatgctgccagtaagggcccttggtgtggcctgaggtttcttaatttttattataaaaatagaacatgaatatgtctctcctgattatcaccaccaaatacaccagtgaaaacatctatggctacatattactctaatgcaacactaatgcttacactggaacagaaaatcaggtcattgtcgagagtctataaatggacagccctctccatccattacttatttatgtttcccgccttttgcttaaccggccttgaggcccaaacagagaaacacaccatacataaagttaccagtccagataaataaaacatcagactcaaattggcagcttcatccttcattgctttggaggaggtggacttcaacagccagatgctgcacaaatgatcagcaaaatgtgaccctttgagaccgcagcagacaagtcattcctaagacgtgtatcttcccaaaagttagctttgccctttttagagaacattcttgtttactgcagacagaagacaatgatcccaaaataagtttgagcccaaatctctttgagttgggcaaactgagactgacattgttgaattcatcaccagttgaagtcaagggtttccccatgtggccggccctacagttactcagcctgaaggctcatcatggtaatattacccatgggaaggtctgcatagtaacgaaaccatcagagtccctgtgcaaagttccagcagaaaaacaatgatgctaggacccaatcctatctgatggcccagaggtatctatggccctgggggaagcccttcttagtaaaaggaagacccatctccaggaacaaaatgacttgccttgctccttacagtcttctgtctatctactcacagcagccatctcttagattgaacaaagtaggatgcttttacctagttttcagcttagccttgtgctaggcaacctgtgaagtggctctgatggagagagctggtgtaattagcagcacagggcacgtttccagaaacagcctggatggagaaacagagggcacccttgcacacctgtcacaccttcagcctctgctcaaaagtgtccaccttctttgtccacagtagctacagaagtgaaaatgtttgcctcggcatcctctccatcaccgtcaccatcacctagcccccaaacggggatcacagtgctctatccacccctgagagcaactgtgtgcagtcaccagcaaggatggttctgccagagtgacgggcactgcctgtgaccatacagtggcagcagtcaagaaacaagcccttctgctcaatacttcatcttttcctgtgtgctgagaattaagtacctcttagctagttagaaaaactagcagttattattgatgaaatgtgtaagacagacattttgttaggggcagaggagaaaatagtagaaatgtccagtcgttgaggactgtctgtaaaaccattcaaatcaaaccacttcaagaaggataaagcactgtgctgatgtaagggatggtcattagataagaggagtattacatcttatgctctgtgaaggaaagggtataggtcttatatttttttttaatccaatgataacaactgcaaacatttacttaatgtgtgctaggcaccatatggagtgctctatgttggattatctcatttcatcctcacaattttatgaggaatatatcattattatcaacccattcaatggatgaggaaaccgaggcatacagctggcaagtggcaaagccaaagttagaacccaaaagtctgacaccaaaactcaacctgccccctctgacacagaaactttcatggagctcagtgagaactttaggaccagtgtaggcactctctgaattcttctagatagcactgagcttgagtatggttgttgtttaagagtatttactgtctgggtgattattctggctcatttcataaggcttttgtcttggtgagaaagcactcaccatcttctagttggaaagccaaggtcttccaaccttgggaaaatcctgcctcattatgccaagagttaccaaacagcacaggaaaatattatcacagatttcctgaaactgggtgagatcattcagttcaaagcctgcacaattctgtttcatatgcactgggggcagaaaaatgtatgattggtccttagagctcattctcatgggtgattccaccagtttcccagactccaacttgggtcttcccagtagtgtctgctaccaccaaagacagtaaggtgcagtggagggagttctgaaccagaacacctggttcacgtttcagctccaactactgttacagtttgtgtgaccttgagcaaatcacccagccactctggccatctgaaatattatcagtcaaatggggatgctgatatttgtgataatgttacataaacttgcctacctcagaggctcgcagttaggaccaatgaagattctatatgtgaaaacacaggttaatacagagcacaatatcagtgataatagctaatatttcttttctttttttgcttatgatgtgccaggaacctcatgaggtggatcatattatctgcaattgctggtgaggaagaggaaggagagactcagagaacgaaaattagcagaagtagaatttgaacctaggtttttaggttcaagataggtttttccagcttgtgtacacaagctaatgttgccctaaagggagtgaaaattgatttttgagggccaaaaagttgctgtttttatatataaagtacagatatacacatcgtacataaacagacacatagtgtatttgtatctgtggtattacaatctcatggggagagtgattagaaaaaacaatgtctaaaacaggtctgtaggaggcaataatgaagaaaaatttgagaaatactggtctatcttcaccctatcattccatttcccataattaataaagatgatcattgttaccatgacaattaagtttctgcagtggaaggttgcatgctgtattcaaatatagtacctgtgaaggtggtggccagtttagttgccactgtagatgatctagcttagaggtcgtgtgcaaagaattcaaataccttcacatttaaattctaaagtgtaaaacttctgccaatcaaaattagaaggtaatgtggcattaatgctactcactctacaccctggatacaggtacatggttagatcagttcatacaaactagaggagggaaacactcacttaaacattttaaataagagggaggcaagaaggtttgcttgaggccaggagtctgacaccagcctagtcagcacagtgagacctcatctaaaaaaaattttttttaatactgggaaaaataaaaatgataattggtgcatttagaacattaatacaaatctgcctagatctgccactggggatacagattgcttcttttctttcggctactgaaaaaactggagatttgtgtgtaaactccgagtaatatctgtgaattaaataaaaaggcactggcccatgcccggcttcttaaacaaatcaggcttattcatgcaacatgcttccagaaatgtgttcaagtcctgtcaccagtgatggctcgatcaaagttatttgctcaggccattgctcgttggtccatttcaacttgctacgtcctgtagccatcttcctctctcagacctcttccctcggcatcgcagctcctgacctccactttggccttagtgctccctcggagacttcttgtcattccaatcatggattcactcactcattcactcactcattcattcattccattcattgtattatatacaacaaactgcgaccttgttcccaccatgaaccaggcattctttcagcatggtagccctgcctctcaggtctgagaggtccaactgtctgggccagccttgtccagattctctactggacaaagggggctggagaggaggggcatgcagtcatcagaggcttcattttgtacaaattgcctttgaggtgttcttctgactggagcacagcagggacgcacgtgctcacttgcaactctgggccaggctggtcctgaggtacctgtgataatcaatccagttgccatagcggccttaagtgttcatttaccactatgcgacctggagcaataatatattatgcctttcgccagagggagccgtgccagcctcagcacagggcggccgtgtcggccatcagtcaccactccccttcacaaccttttgttccccgctcattatggtgaattataacagggggacagcacatttttcaggagagtttctcctgttaagtctgagagctaactcttcccgggttgttccaagtcggctgtgctagccctgtacccctgcaatgtttatgcacgggacagtgccgttcactggacttccctcttttccctcctcttgcacttagaatggctgaaaagcagtgtgtgtgcacatttctacaaggcaagataaaaaaccactccagtgtatttactataaatattggatactgcattttgttgcactctgtcatgtgcccgaaggcctatcctggtggtaaattacattacagaacactaaataggccatcatgtcagctttgagccttggcattgctacttcaagatgagtagaagatcacttccaaagtcacacatgggaggatcaggggccaacacctccaaccctatcagcattttttgaaaatgtttcactctaatagtgatggtgaacattctaagatcctaaaaattagaggctgggtcacaagattagatcactgaaagaaattaaagataaaattgttggctaagatgatttctaatagccccaaaccagaaacaaccccaaaggccatcaattggtaaggaataaacaaactgtacgtccatacgatggaatactattccagtaataaaaagaaattataatacaacaacatggatgaatctcaaaaacatccgctaggtgaaagatgttgaacaaaaaagaatatgtattatattattgtatttagataaaactctagaaaaggcaaaatacagagacagaaagctgatctgtggaagccagaggccaggttgcagggggacgggattgagagccaagaggcccgagggaacattttaggtgagggaactgttctatgtattgtttcagatggtggttatggttgtaaacaataaccaaaattcatctaactgtatgcttataactggattacattgtatgtaaataatattgtagtcagcctgtaatcccagcagtttgggagtccgaggcaggtggatcacgaggtcagaagattgagaccatcctggccaacatggtgaaaccctgtctctactaaaatacaaaaaaattagccgggcatggtggcgcgtgcctgtagtcccagctactcgggaggctgaggcaggggaattgtttgaactcgggaggcaaagcttgcagtgagccaagatcgcaccaccgcactccagcctggcagcagagtgagactctgtctctaaataaataaataaataatcataatattttagtcagtggaagaaaaggaaaacaaatgttgaccaaggcaaatggccatgatttttctcctatgtgatagcagacctgcaagaaagaagtggtattgtatagaaaaacaagttatactcattagacaaaatcaaatgagccaactttgtgaacctaagcttggagacaccaaacacttcataatttttatggcatggtgataagctattacatataccaaccctgggatggaaaagccttgtcagttgcagttcaacctctggttaattcaagctgggtctaaaaggcactaaattgagtgtggtttcacttccttggacttcaggttccttgtccttgaagtggaagggttggatgaaatggttgttaaagcttcaaaatgatacaactgtgccagtctttgctcaactccaagctctttaatgtgttggcgtctcgcgattccatttagctattaggaccccagggccaaatctggcttgtcccaatgtcattgttctacagaaccgggtgaaggggcctaagatacttggaggaaagtctaccagtgccatggtcaacagtgggccctcccaatgagacagcctcgggctgagttccctgtctggacacagcagccagtttctatgatgctttcacccagaggtgttcttggaagatctccagtgtactttatttttagttccttggtgagtgctcactttgtattctaagaaaacttttagatctcaagacaaggaatttttgatctcacttttttacgcaattatgagtcattccacatgttagcattagcaacccaagacctccctctcctcactgatctatctttttcatctcttcaaagatcctggaggtaaggaagggttttaaatgtttgcccttgaaaagaaaagacgtgcaaaccggaaactggtgactagcactgctgttgttaccaagaaatagtttttaaaagcagacattttaggaagataattgttgatctttgcattacccaccagtccagtgagcaggcaaatctcctatgcataaaatctgctaagtcttcaagcaaactcacctttcctaaaggattgaattaaaacttaatccataatatcttcggaagattccccctaattttttaaaaacatggaattttttttttcatgtgatagatctggttgaaaaccaaaatatcagcaaaagccacagctcatcataaacgtaactatctatggagcccttacataatggtcagctactgtgcacacagtagatctttcagaccttacaactagatgtggaaactgagtcttagtgagtttatgtctcaaggccaaggctgcctcgcctgtaaacagcagagctgggatatacacccttatcagaccaaatcccaaatcagtgctcttccccctagtgcttattgtcaaattctggtttgtcaaattgtcaaaccagaaccaggtttccgttttacgtttctattcataaggcgaattatgtgtgttaagcaagatgttcggcaattatttgcccatggatgaaaaggtgtatgcttaggtttcttgtatcttatactttgcttcacattagggatgtagcctcaggcacacattcatgtgagcagtgacctgtaatcagtttataagattatcacttaaaagaattttcctgttactgatgatacttagagattggctgttagaatgctgtgtgaatgttatatgcatatacatacaaacatgttttctctttatccttgatcttcctatcctccttcaaaacaaacaccgtctttaatctttaggtttatgtgcaaaagtgataatgcagacataccctgggatggaggtggggaggacacaggcaactgggcataaggagagataataagacacaattccaaggctggcctttgctggccttacacattctggaacaaataaagctaacaatattatcaagcccacgaagccctgttagagttgaaattgcagctcactgaaggtcaaatttattagattttcttttctgccttcatagaatggttgaataacaacttcctatttttagcatgaactctcctttgtaattgcttcacccaaatcaagaaagctggagtcagggtacctgtatccatctttgctggcatcatgttctaaatcaagtccaagtagctatgcatagtagcatcttcttattttgagacttggcccttcaactagtggtttagaaagaaaggtgactttgctaggatgctggggcaaaaaccagggtgctgaggaagactgccaggttctgcaggacattttaaaagtacactgtcaggtttggggtttaacctctcacatgtctttcttaattttttttttttttcacttttaaagttagcttaggaacgtcaattctgattctattcaatcttgttctggctcttgtagtcactcttctgaggcactcttgttctttgctgtatcaaggtcatacttaaaaagagatgttatttcttgatcagggttttgagaggattacattttcaatgtgaaggttcagccactgttttagaggactgtactaatgagcataagacagaaggtcttggcccaatgtggacccgcattcagttctattctccaaggatgacatctttaacctcagccagctatttcgcaaaagtgagtaatgggtcggctgggcatggtggctcatgcctgtaatcccagcactttgggaggctgaggtggggggattgcctgagctcaggagttcaagaccagcctgggcaacacggtgaaaccccatcactactaaaatacaaaaaattagccaggcgtggtagcgtgtgcctgtaatcccagctactcgggaggctgaggcaggagaattgcttgaacctgggaggcagaggttgcagtgacccgagatcatgccactgcactccaacatgggtgacagagccagactccatctccaaaaaaaaaaaaaaaaaaaaaaaagtgagtaatgggtcaaaggggaccagatgagagcataaatgagcataaatatatcacttctattaactaaacaaaccataaaatggaggccttttgccatagtcagtcagtcgtccattatcatgacaggaaaaatcacacatatgctctcatatgagttgtccatctgtcaaagaatttgtataaaccgaagaacagtaacatgcactgaagatgaaaagcacctggggagctttaaaaattcctgaggcccaggccaccctggtcccacctgggaagtctgatgtaactggtctgagatggagcatgggcatcagtataatttaaaagccccaggaagatcctcccatgcaactagagctagaaccactggtctagacccagttggccacagtgaacaccgtactaagggccagggactctgcacaaactgccttaatgggtggagttacaggtggtaaaaaacagaaaaccgtatacaataagcagcacggagcgagatgcggtggctcaagcctgtaatcccagcactttgggaggctaaggcaagtggatcacctgagctcaggagttcaagaccagcttgggcaacatagtgaaaccccatctctaccacaaatacaaaaaagaaaaaaatggccaggtgtggtggcaagcatctgtgatctcagctacttaggaggctgaggtgagaggactgcttgagcaaaaggggcagaggttgcagtgagctgagatcataccactgtactccaaaaaaaaaaaaaaaaaaaagcagcatggcccagaattcctgtctgatgcttcccatattcccagagggcaatacaccatttccaataatcgtccctgcagaaggatagaaaaatgtcagcaacaagagtgacacttaaaactgcaccccagactcctgtggttgagatgctgcatgcccaacgtggtctgacttcccactgactgacctaggcatagcaccaggtggagcatgcagacatatcaaggtttccatagggtccacagctcagagatataacagatgcccgataggagcaaaatgaaagattgaaacaaaaacaaacagcccactttggttttagagcagagaaagctaggagctgattggcttaagagcagagaggaggaaggctatagtttaatatacccagcaaatccagcaatatggggctggaccaccccatatagataacctataaaatataatttccctccccaccctctctctgaaaatccaaactcatgatcacataaactgcacaaatcatgggaaagaacaggaactctcatctctctttttaaaggaaaatatgtattccacggttcctgttggcacgagctggacattacagggctgatatctctggggacaaggcacagtgctggcttcttgcatggaggcaagtggtgccaactggccagcataccaggttggctctcttccaggacacagtggcttgcatgagctcccgtcaggggaaacgttgttatatcatggctgctgcagacaagaagatgatggaaaggataaggctctccaggctacaactaccgagaacagtgcttgttagaaaaaatacttttcaccattaggggaggaaaacggctctttctccaaattcctcccatttgctccccatccctgccatgcataacaatatgttccattcagaagtagtgttagaaataaaggattgcagacaaaactgtactttggaaaagggaaaataattggttcactcaaggggcacttttttggcaaacccaaggcaactcacaatggtacatatgcttgtctatcccagtgcacatgatgagacctgaaatcgagaggtcacttctgtttgtgggaaagccaggatcacttaattggccagaagagccagaagcaagctaacctatcaacctagcttttaatctatgaggcagaatctattccctgactttttcacacaggtgatgatgctcataagttctcccagcagctgggcagactgacgagtcaggaatgtaccaggttccccaccctgagttcaggctgggctcactctagcactcaggtgggttatatgcaggagaaaccaaggaacctccaggaagaagatgcattccaaggggagagtgaagccaagtgcacctttctgaatcaaagataatgagccaggatcagcgggtgtgctgagggtgattccgcacagcgtcccccaccctgagtgtcctatgtcccatgggagagcagctgcaattgcatggatgaataaaaccaaaatgactccgactccctctccctctccctctctctccctccttctccccacggtctccctctccctctctttccagggtctccctctgatgacgagccgaagcgggactgtactgccgccatctctgctcactgcaacctccctgcctgattcttctgcctcagcctgccgagtgcctgcgattgcaggcgcgcgccgccacgcctgactggttttcgtatttttttggtggagacggggtttcgctttgttggccgggctggtctccagctcctaaccgggagtgatctgccagcttcggcctcccgagttgccgggattgcagacggagtctcattcactcagtgctcaatgttgcccaggctggagtgcagtggcgtgatctcgggtagctacaacctccacctcccagccgcctgccttggcttcccaaagtgcccagattgcagcctctgcccagccgccaccccgtctgggaagtgaggagcgtctctgcctggctgcccatcgtctgggatgtgaggagcccctctgcccggctgcccagtctgggaagtgaggagcacctcttcccggccaccatcccgtctaggaagtgaggagcgtctctgcctggccgcccatcgtctgagatgtggggagcgcctctgccccgccgccccgtctgggatgtgaggagcgcctctgcccggccccgaccccgtctgggaggtgaggagcgtctctgccccgccgccctctctgagaagtgaggagcccctccgtccggcagccgccccttccgggagggaggtggggggccagcccccgcccggccagccgccccgtccgggagggaggtggggggccagcccccgaccggccagccgccctgtccgggagggaggtgggggggtcagcccccacccggccagccccttctgggaagtgaggagcccctctgcccagccgccaccccgtctgggaggtgtacccaacagctcattgagaacgggccatgatgacgatggcggttttgtcgaatagaaaagggggaaatgtggggaaaagatagagaaatcagattgttgctgtgtctgtgtggaaagaggtagacataggagactccattttgttctgtactgggaaaaattcttctgccttgggatgctgttgatctttgaccttacccccaacccggtgctctctgaaacatgtgctgtgtccactcagggttaaatggattaagggcggtgcaagatgtgctttgttaaacagatgcttgaaggcagcatgctcgttaagagtcatcaccactccctaatctcaagtacccagggacacaaacactgcggaaggccccagggtcctctgcctaggaaaaccagagatctttgttcacttgtttatctgctgaccttccctccactattgtcctatgaccctgccaaatccccctcttcgagaaacacccaagaatgatcaataaaaaaaaaaaaaaaaaaaaaaatgaaacaaaaaagggccgttttccagaagtcatgggtagcacctggctagtgcaaagtgcagtcttgggtgctgtgctgcctgcagcctccgcagtgggagatggtacctaaacaaggtattgggaagagttgcagcagtaatggcatcattaacaggcagggcatggggccttggggcctcaggggcagctatttgtgggcatcagaagtggcattagtgctatccacagacaacaacaccacccctatggccacctgtgggcatctataggggtggatgatgccttgatgatttccttggatgtcatggctaagccattgttttttggcagctgcagcttctgaagatgttactgagagccacagagaaagtgaagacggctaagacaaccaggtcatgcgagacatgcccaagacgcccagattgcttaaaagacatttgggaaagggagcatttaaagttctttccagaggatggatggggacaaaactacctggagagcctattttttattcccaggcaaatatgactgaaaaaaaaaaaatcacaggtgttaaagaagaaaaataaaattggatgaaaaaatgtctctgctttttctggtgatgcaaatacaaggcatcatccatttagaagaaataaatacattttttctttccactccaaaatgccaacatttacaaatgagttatagaagtcacttctggaaggcaaaatactctccatggttcatttcctcagtcactcaacaaatagtaactaaaaatagatgaagttcccagctagtgcaaatgtctgtcagggataagtaacaacagaaacaacaatatataatttatgccagacttttttacatgagcaacctcatctaacacttatgaccctactgtgacaagtaccattttctcctattttaaagatgaaaaaactgaggcttagacaagttatgtgacttggtgaagataatagaaatattaagggaaagaacaaggtcacacatttggatcttccaattctagccctagattcttcccatcccccacaacaaatataagatacggtcctattctctgctttcaagaaacagacacaaacccattaaagaactagaaactagaacctgtttctattctctcctggttctaaaggatggatgcagaagagactgatagttcaggcaggagaggaatcaatggaagctggaattgtcaaggagttgttccagagcaggagagatataaggatctgaacaggcaaacaggaaacaggcagagttgagtagaagtatattctgagcggtggacaagatgaagaaatatgagctttcttcctaaggtgtgctggagtgatgagatacagcacagtagtggtgtccagtcctgcattctttccttccccaacatctctgaagcacctagcatgcaccaggcaccttgttacacccagtagcacacaccccctatgacatggccccttccccgtgaagctcacagcctaacgtgttgaggcagctgaaccccacgtgattcccagcccagccaaactgtctcctactatccatgatgaaaacatcagaagttgccaggccaaatcttgcttggcttctcaaatcaggctgtttatcagcactgcttcacacagataaaacctctcaatatggagctaaagtggaaaaaaactcagcacgtaaaaataaactgcccaaatcgtgttccctccccactccattcagcgcccagtatcactacacacgtgaaaatgccacacagccctggacccgagcagcagagcagctgctgtgtgtggacacaaagtacaactcagagccctctccacttctgctccaattgtcgtagcctcgtctgaactctgagctggacactccactgcaggatacagagcatgaattgagagaaagcttcctaaccttcatattgtcaactggtgtcttgctgcatttgccacagatcccatagtgtggtgttagaaatggtgttgacacactcccacatatctttagcattacatttcccatgttgctcctccttatatctttatctgcacttggtttataagtgaaatcaactgataaggcttccatttcataccatctgttatgtgtcaccaacgctggttttgtaaaagagatgagaaggatctaagactattgaaactttcacagtcatttccagctcggtaggctagaaactgaatcttaaagagtcactggacatactcaaagaagaacttcccactccaagacacataattgtcagattcaccaaagttgaaatgaaggaaaaaatgttaagggcagccagagagaaaggtcgggttaccctcaaagggaagcccatcagactaacagcggatctctcggcagaaaccctacaagccagaagagagtaggggccaatattcaacattcttaaagacaagaatttacaacccagaatttcatatccagccaaactaagcttcataagtgaaggagaaataaaacactttacagacaagcaaatgctgagagattttgtcaccaccaggcctgccctaaaagagctcctgaaggaagcgctaaacatggaaaggaacaaccggtaccagccgctgcaaaatcatgccaaaatgtaaagaccatcgagactaggaagaaactgcatcaactaacgagcaaaataaccagctaacatcataatgacaggatcaaattcacacataacaatattaactttaaatgtaaatggactaaatgttccaattaaaagacacagactggcaaattggataaagagtcaagacccatcagtgtgccgtattcaggaaacccacctcatgtgcagagacacacataggctcaaaataaaaggatggaggaagatctaccaagcaaatggaaaacaaaaaaaggcaggggttgcaatcctagtctctgataaaacagactttaaaccaacaaagatcaaaagagacaaagaaggccattacataatggtaaagggatcaattcaacaagaagagctaactatcctaaatatatatgcacccaatacaggagcacccagattcataaagcaagtcctgagtgacctacaaagagacttagactcccacacattaataatgggagactttaacaccccactgtcaacattagacagatcaacgagacagaaagtcaacaaggatacccaggaattgaactcagctctgcaccaagcggacgtaatagacatctacagaactctccaccccaaatcaacagaatatacatttttttcagcaccacaccacacctattccaaaattgaccacacacttggaagtaaagctctcctcagcaaatgtaaaagaacagagattataacaaactatctctcagaccacagtgcaatcaaactagaactcgggattaagaatctcactcaaaactgctcaactacatggaaactgaacaacctgctcctgaatgactagtggatacataacgaaacgaaggcagaaataaagatgttctttgaaaccaacgagaacaaagacacaacataccagaatctctgggacacattcaaagcagtgtgtagagggaaatttatagcactaaatgcccacaagagaaagcaggaaagatccaaaattgacaccctaacatcacaattaaaagaactagaaaagcaagagcaaacacattcaaaagctagcagaaggcaagaaataactaaaatcagagcagaactgaaggaaacagagacacaaaaaacccttcaaaaaattaaggaatccaggagctggttttttgaaaggatcaacaaaattgatagaccgctagcaagactaataaagaaaaaaagagagaagaatcaaatagacacaataaaaaatgataaaggggatatcaccaccgatcccacacaaatacaaactaccatcagagaatactacaaacacctctacgcaaataaactagaaaatctagaagaaatggataaattcctcgacacataaactccccaaagactaaaccaggaagaagttgaatctctgaatagaccaataacaggagctgaaattgtggcaatagtcaataatttaccaaccaaaaagagtccaggaccagatggattcacagccgaattctatcagaggtacaaggaggaactggtaccattccttctgaaactattccaatcaatagaaaaagagggaatcctccctaactcattttatgaggccagcatcattctgataccaaagccaggcagagacacaaccaaaaaagagaattttagaccaatatccttgatgaacattgatgcaaaaatcctcaataaaatactggcaaaacgaatccagcagcacatcaaaaagcttatccaccatgatcaagtgggcttcatccctgggatgcaaggttggttcaatatacgcaaatcaataaatgtaatccagcatataaacagagccaaagacaaaaaccacatgattatctcaatagatgcagaaaaagcctttgacaaaattcaacaacgcttcaggctaaaaactctcaataaattaggtattgatgggacgtatttcaaaataataagagctatctatgacaaacccacagccaatatcatactgaatgggcaaaaactgaaagcattccctttgaaaactggcacaagacagggatgccctctctcaccactcctattcaacatagtgttggaagctctggccagggcaattaggcaggagaaggaaataaagggtattcaattaggaaaagaggaagtcaaattgtccctgtttgcagatgacatgattgtatatctagaaaaccccattgtctcagcccaaaatctgcttaagctgataagcaacttcagcaaagtctcaggatacaaaatcactgtacaaaaatcagaagcattcctatacaccaataacagacaaacagagagccaaatcatgagtgaactcccattcataattgctacaaagaggataaaatacctaggaatccaacttacaagggatgtgaaggacctcttcaaggagaactacaaaccactgctcaaggaaataaaagaggagacaaacaaatggaagaacattccatgctcatgggtaggaagaatcaatatcgtgaaaatggccatactgcccaaggtaatttacagattcaatgccatccccatcaagctaccaatgactttcttcacagaattggaaaaaatactttaaagttcatatggaaccaaaaaagagcccacatcgccaagtcagtcctaagccaaaagaacaaagctggaggcatcacactacctgacttcaaactatactccaaggctacagtaaccaaaacagcatggtactggtaccaaaacagagatatagatcaatggaacagaacggagccctcagaaataacgccgcatatctacaactatctgatctttgacaaacctgagaaaaacaagcaatggggaaaggattccctatttaataaatggtgctgggaaaactggctagccatatgtagaaagctgaaactgtatcccttccttacaccttatacaaaaatcaattcaagatggattaaagacttaaacgttagacctaaaaccataaaaaccctagaagaaaacctaggcattaccattcaggacataggcatgagcaaggacttcatgtccaaaacaccaaaagcaatggcaacaaaagacaaaattgacaaatgggatctaattaaactaaagagcttctgcacagcaaaagaaactaccatcagagtgaacaggcaacctacagaatgggagaaaatttttgcaacctactcatctgacaaagggctaatatccagaatctacaatgaactcaaacaaatttacaagaaaaaaacaaacaaccccatcaaaaagtgggcaaaggacatgaacagacacttctcaaaagaagacatttatgcagccaaaaaacacatgaaaaaatgctcatcatcactggccatcagagaaaagcaaatcaaaaccactatgagataccatctcacaccagttagaatggcgatcattaaaaagtcaggaaacaacaggtgctggagaggatgtggagaaatgggaacacttttacactgttggtgggactgtaaactagttcaaccattgtggaagtcagtgtggcgattcctcagggatctagaactagaaataccatttgacccagccatcccattactgggtatatacccagaggactataaatcatgctgctataaagacacatgcacacgtctgtttattgcggcattattcacaatagcaaagacttggaaccaacccaaatgtacaacaatgatagactggattaagaaaatgtggcacatatacaccatggaatactatgcagccataaaaaatgatgagttcatgtcctttgtagggacatggatgaaattggaaatcatcattctcagtaaactatcgcaagaacaaaaaaccaaacaccgcatattctcactcataggtgggaattgaacaatgagatcacatggacacaggaaggggaatatcacactctggggacggtggtggggtggggggtggggggagggatagcattgggagatatacctaatgctagatgacgagttagtgggtgcagcgcaccagcatggcacatatatacatatgtaactaacctgcacaatgtgcacatgtaccctaaaacttaaagtataaaaaaaaaaaaaaagaacttcccataaatgtgagatgggagtaaaatctttacaagtggatggtgaaagcaattgtcttatggaggtctgtcttatggaggagtgccctgtttgggccccagtggatttggtattcatcacctattgacctatgtggggtttctactggatttaacaaaagtgaaagaagcctgttgccaaaaacttcaagggcaaattctattaaaccttgaagtttcaagtgaaatgccaaatcttcttgaactattaggttgttgcaaaagtaattacagtttttgccattaaaattaatgattccctagactccaagaccagttatttttgctgagctctccaagcacttgaagggcctcattcagctctcattacattctgggcagatggtgagcttcttgagggcatggacttgctttattcctctttgcagtcatccagtaatgacagactggatgactcaatacatacttactgaggaaaactgggcatttttctccagttatgtgttgctttgacttaccacattaacatgggttttgtatctttttaaaaatccatcttaaggctgggcgtggtgactcatgcctgtaatcccagcactttgggaggccgaggtgggtggatcatgaggttaggagttcgagaccagcctggccaacatggtgaaacctcgcctctactaaaaatacgaaaattagctgggtgtggtgatgcatgcctgtaatcccagctactggggaggctgaggcaggagaatggcttgaacccaggaggtggagtttgcagtgagccgagattgtgccactgcactccagcctgggtgacagagcaagactccatctcaaaaacaaacaaacaaaaaaataattgtaacgtgtatgtgttattcaagattgctggcattgtctcgttttaaagtactcatgaacattaggaaatatgataatacatacaaaacatatagtatatttcattatatagtaagtactcaataaatatcaggcagacctccataagacctccaattgttgtcattcataaggttaccctggcattgacttcatgtctttaaaaattcctggttctaaatgcaatacaaatatttttcaaaagatgctaaatattcttgggaattcaacacaataagaactcacatttatacagtgcaaaagattttgtgagtcgatttttacaaagttacaactgctgtcttttgctggagaagaaatggagacttggcccccatatatgctctattcaaggtcacagagccagggtggagcaagaggagtcaggcccaaacaagaatgctgacttccaatcctgacagtcccaacgcctctctagttcttccttgctgctttccaacatttttttagtttatccattttgtgtattccactgagaaaaggacactttatagacgtatattctgcaaagaggtcagatgacatctgaaattgcaaagcggtagacaaagcttttgagcaggatggtatattattgaaaacagttagaaaataatgaacaacattgtaatcgctggcacaattttaaaaaagattgctttacctggttttgtttcctttctggttagataatttcaccagcctgtttgtaacaaaaagaagcagggcaagcagattctcttgctggaaatttaatagcatgaagttcagtgatgaatagaattatttctcttattttgatcatgctttgcccacagtatgaactcaataaacacttgttcaaacaaattattattacaatgacttgttttttttttccactgggcagtaataactttaatttgtataatgctttatagtttacaaaacatattcttcatgtattaccatttaattctcacagcaattccaaaaggtagatactaatttcttcattttacaaatcaggaagcagacgcccaggtaagacaggtaatttgtccaaggtcaaaactgctcacagagcaagacctgctagaaaacaatgacaatttaaaagaaaactggtcttttaggggaggaagtatagcagaatgggaaagtataggagctttgaaccaaaccacccaggttcaaaccatgtctgtacgatgcactagctctgtgatgatgcacaggtttcataaatattctgtgtcttggtttcttcatgtataaaatgcaagtaacgataatagctgcttagcagtatattagtttgttaggatgacttatatgaagtgtttggcatttattgagtactcatcttaaggactcaataaatagctattactgttacaatgattactctttctgtcctcagaaaagtatcttagtaggccccctcatcctttcaattatcagtacataccagtctattataaattgtagaggaagctgtgagttagggacatagctcaagcactggaggtcctccgtgtgagtcttggtcccacctttatcagctgtgagatcaggagcaagttttcgaatctttctgatggccagattctgcatctatgaaatggtatcactcttgtcctatcagcctcacagtgctgctgtataagtcaggtgagagctgaagggaaggcactaggtagtccattcattcactcattcattcatagcctgttggcagtgtgcctcctaagtgccaggcactgtgctaaacagtggtgattcaaaaatgagtcaagacgatggaggagacagacgggtagaatgataagtaactgtattagaatatgcgttcaagtaaggtattattacaatgcacttatactgaaatagacactttgcgggctataagagtgctttaaaaatgtgaattcagcccacattctcactgcagagaaaagactaaaatcctctcagcaaccacattcaggaactttgccaagaaaggcaggtgaggactccattgtgcctgtcatccttcagcatggaagaactagtaactgcaagggctatgattgtagctgttgttccaacagttctgtgacaacacgtacctcctcaaacacaatgcaacagtgaggcctaatgtcccaggatttattttcattaagtcgatgcttatggaacacctaatatgtgacaatcactgtgcctggtaaataatgttggaaagaacactttgctcagtccctgagggggctatagttcagtgaggcagagatgcacatatactaattattttgaaatagcctgactggaggtcaggaaggcttcctggaggaggtcacacctaatcttaaagggtaagagctagttagctagagaaaggggggacagtatgacagaaaagagaagaacataaagaagatagagactgttctaaaagagttaattatcctagtgaactgctacattttcttctcaaatataaatacttggtccccaaatataatcatattatgtcccgtactttccatgatttatcctataaggagctttgtaaacataactaatactcaaaatgacctatgaggcatgcttgatttcagagtctttttttttttccctaatccaggataccttgaaatgagaataattagccaactgctttgattcaatgtctcctttgaaattgttcgtctactttatttcttcaattggataaataaattattcagaaacctgactatgggagcacacaaatctaaaatctgagctagaattttggtgggcaaaagttcatatctcattacagaagatgtttgatataaatattaattttcctaaagtggtgatggcagagattttatacaaaggatgttcatattggattaaacaccagattcaaattacctgagcctttgcgtgcatggagcatcaaattccatttcatcttgataagaagctgccctggagagtcattagggatttagcaggctaatgtggtccactgcccccttaccaaaacatatgactgtctaaaatattatttatgccttaactgccttgcctagaggtggagaggaaagtgggattttataatatcccatataatataaattttgcccctgaaactgaataactgtatattaattgcctagcgtagatgctcattcgattatacccaatcttcccaaccactctgggaggctggaattttatccctgttttaaaaatgaggaaactggagcacagagaaattaagtatcttattcaaggtcaaataattgagacttagcaaccattgttgtgaataataaaggaaataaaacgcatggaaaatgcctaatctggtgactgacagctaagaaataatggcagccgtggctgtcattaagaaaatctaccatccacaaaaatgtatggaaagtacatttggaatgtgtcctgtgggaagatgattcttgattgtgggtcaggatatggcacaatctgagacgtccactcagtaggtttgcacagcaacttggctcaggcacattcttaggtggctggcaaggaagacctcacagaggcaatggcccatactctctgcaccagaagagcaagagtcccagcaaccaactctctgccaacaagccagacatcgaaactcttcaaacaccatccaagtctgaaaactgcacacctattaaagttgtacctgcaaagagatccttatggacatattccaaggctgtagaattttggaaacttcaaaagctagaactaccagcttgcttggtacagccattgccattaggtacttttgtgtaagaggaatagaaattgtttcttttccttgcttttatgtctactggacagaggactatggctgcttgactcagtgtaacagagtgacaagtaggaaactgacccaaagagatctaacaaaatatacattaaaaaatcattttcctgaaacattcaaataatttcaagtatgtggcatcttagcctgactagtctaaattctagcactctgaaggaagggcttactggagtcctagttcaaccacgtacctgatagtgactttgttccaatgtctttatctttaaactaacgtattaggcaacatcagtgtgtcctgaaacacacaaatgttgaaagatgtttccaggagccttaaaataaaagggttctttacaaaaataaacaacaacaacaacaaatcctatagatatggctcatgtttgtatcctttcttggagagtcaccgtgctaatgggagcatattaaagagcctgaaactccagatgcagacatattagtgtccttcaagtcatcatttccacatttagtgggccatgaagtgtgacacctttaaacaccctgggaaactggtaggacgcatttgaaaaaacaccggattaaatggtcctgaaggttcttctactgctgcatcccatgatcctccagagaaggcttttttttgttttgttttgttttgccataaaggtttatggtagagacatatctgtgaaaaatctctcaattcctctcccatctagcacttgtggcctccttctcatctctctttcctggccttggggtaagggtgcgggcttgccatgcaagaggaggtatcctctatacttccctatagccagtatagattgtaaaactttcctttgaaaccccctaaataaatgaaaacaggattttttttgtgtgtgtgtggaatgaggaaaaaaattgcctgaaactaggatatgaggttctggacacttcctggtttacacagccacctggctttacctccctctcattgctacaaagactagattgattttgtggtcccttcccactccaaaattacatgatgccatagagacatgttaaagaagaatctttatcataaaatcattagcttacggctggcacatttaacaagcatggtgctctcatgcaattcctgtagcaaagacaacctctacaagcaaatgagccagccatttctacttgttctcctgaaaccatcctcaaaggtgggggactctcttaggaagtagcagctgagatagcacttgagatagacacagatttaggcaatacaattgtccatctgattaaaaagaaaatacctgctcaaaaaatagtctttggcctactggaatggctaattaggagtctgtgcagctgatctactgaatggggcagcgactagagagttacacgatcaggagagatgaattgcagacacaccagtttctccttaaaatccattttcatcatgttacactttggcacacaaatcttttttttttttttttctaaaaacagttttccctctttcctactgcacgaagtccaaattcctccaaatgacttctacgggcctccaaaggctggcttcacttgatcgcctctggattttaacacattcgcttcactctagactgtttcactctttggtctccctgcatcaccaccatcattcctcctttttagctgtgtgctttacaggtattatttcaaataacctcaaagcaacccaagagaccgacaccattgttatcattcccatgtcataactgggaaactgaggttaagtaacttacccaaggtcacacagatagcaagcagcagaactgcgatttaagccaaagccatctgtctccagtcttcactcttaactctcagtttatataggctttattcatcttctttcccaagtctgaccactccatcaaggtcaagggcaaatctcacctccttcaggacattcttagatctctctggcctctcacctggccgttccatttgctacacttccccacataacatttcttttctcatgttgtgtcatgctgatctctgtgtgcatggattctgattggactgttagtcacctgaagctggggaccaaataaagcataactcctatatctgctacaatgccctgcatgatgtaaaaggtacatcatgcacaacagaaatctgttcacagaagagttctctgatggtcctataaaggcattgctccagcctcaatcttcccacctgagatacaggtacacctggtccttgaagccaagattcacaaagataaaaaaaggtaacaagaagaaaatgtttatcacccattgatatacgtgacagagacttaaaagtcaagtgccgataatatgaagtaaccacacttgtgttgccataaagcgtctcagctgctactttaaatttggcctaagatatgaatgggcaggagcctctttcctttgaaagactttcccggctctgaatgggccaaaggaaaggaggagggaggaagaggggaaagaagccattatggctttaatagtttaatccaccgatatatgttgtcgacctggccggcctccaggagcactgagaaccgccagctcaagccaacacaagcacatgctaacttgatgggcagtgtaatgagacacagattgtatagctgaatgtaggcacaaagccctcatcaggtttatggttcctggggtcccagcctgaaaacagtaactgacacaggcaccacatgcgctgggtttagacatataaacacggaaggcctgcgaatatatatgtgaaaggtgctggggtttgtatttgtttggcccagtgcatgagctgcagatgggcagattctgttggaacattgaaaggtgccccggtcctgaccgagtgctgttttcttcttactgtgaccacgaggcgagagagtgagagtgagctgctttgaattccgagtatctttgcttttctggaagttttaaagttgagctttcttcttcaatgccttcaattatcacagtgcaaatgattatattcccagcacctccacccaatagctacagaaatttggcatttcctgtcctgactagaaaatgacctggcacagaccgagcgtaagcctggctcttcagcttttttcctgatgcagcctttaactcatttcccctccccactttctaactgctagagaaacaagagattagtgcagatggatggaaatattttttccgcttcagcacttgctgtcagaaccaagtactaagaaggttctcagacagtgtctcaggcaacctggaaattcccaaactcatcttaaacaatatttacctggtcccaaaaggaatgcacagaccaaagaagctgttttcttctgagagcagcccctcgacatgccacttagagttctagtcgaggctggactgctccccgctctcctccactttaccctagctgtttcagagctgtccttgaaacattagcacaccattttagagaccataaaatgaacacttggcagcctgaacacgtccacctgcccaaacatgaatgttgctcttcactgaaaatcatggtccccaggagccaagggttgtaacactctgttgagagtggtggcatggtctttgtctgaaagggctgacaatcaaactgggaaaacacaagccttgctcagaagaattggtagcaagagataaaggccaaggaagtcatagaaaataggtgcaccttatgttcaaagtaagtggttgcaggagattgggaagacaacatggaggtggtaccatttgtggtcatgaaaaataggtagggttttaaaaggtaggaagagagtattactttcaagggaaatagcttaagtaaatgtatctaatcacctctatgttcctactaccatgatgcctataagcagcaatcatactgtgtaccagacactcagatgctctacatgcatatgcatggtacatagcgtaattctcaagcttatgaggcagatatgactatccccatttacgcttcgaagaaattgaacttttcagagggtaaatgacttgcccccaagctgaatagccaatgggtaagatcagctctgattctaaagtgtgtgctcttaactgctcaaaggcatagaagttagaatgtgcagatggtgcaggggagcccctgttgcagagcacaggcctgaggcatgggtcataaggcactgttgactaagcagaggtcttaggcctgaatagcagagatgaggaatgatggaggtggatgatggaagcaatggttgaaaagggccaagtctgcagggaacctacagaggtttatgttaatttctcttgggcctagagcaattatctgggtggtggtggaaaggatgctggcattatctaggttgtggccccttggcctcctggacggggtaagccaataaagaaattgcacttatttgtgaggtttcccttgcattcctctgctcctgtgcacctgactgctgaaggcatccccctcagcttcatctgaagccctttctgagcactatgtgttgatgaaagtgttctactaaatgctatagaactcagcgggaatggcccagttagctctgctagcacattccaggagactctggcagacaggtgtggatttcagccctggctaacatgaacaagctcaggttcctctgcagtatcctagccacagtaggaactcttcacaagctttctggctgggatattcaaggggaggttcatcagtgggtggcttaaagccaaagatttatatcaaattattccttatgtctaacttaagggaatggagagacatgaaaagcaaggtggatttagcacctcttatttgcaggcagcagtgtaccttcatttcacactttctctcacataaaacccctgttgtcctgtaagataggaatcatctcatttaatagactgggaaaccatagcccagaaagtcttaataatttgaccatggtcacatagctggtaagtggtatagtctggtttcaagtagaagttcatctgattcctacccctgaatggttttcccattctgttgaagccatgttggggctctatggaatatttttggtgcctgaggcattaatatgcctatctgtataagatgaggtgtggtgtccagatgaagaggatacccctgggtagcccatttctttatgaagcagagatcccagtttgagccttactgctactcaccctaggattcgggtatggctggtggaaggttggggaggctctagggtgcttcctgggaaagccctcctctgaaaagaatgagtcttgagaggaatagtgtgagggtggggatggagcagaggggagagggtcatgctaagatttcattctgctcctttccttgtagccatatacctgagtcctggggagagacagaataagatggctagtaaatactccagggccctggggagtgtagggagggcagtgctgccttgtggcaaatgcaggtgagtacagccagcaagacttggggtgagatgtcctgctggcacagcacactgtggcctgagcagttgccaagggagcttatgaatgcactgggaggaactagttgagaacactgctgtctgtcttcaatcactgcagccctttggcaaagagcgccacagttgctgatgtgggaggaaagggaagtggtggctggagtggccactgagaggatggcttcagaagcatatgcaagtgacccttctgggagaagcagtggtgcaggggcagtgggtaaggagagctcttgtttgagactcttgggaaccataagttgcactgaattacgccatactaattatgctatggggatgttccctggaccaaagagaagcttctcttgctctctccctccctgtagcaaacatttattgagtgccaacgatgaaccaggcatagattaggttctagagattctgagataactataggatgaagttatccctcaatgaagataccttcttagtccaacaggactagggtattatgggccttgggtactgcagtgatctttaagcccatcagcaccagtggaagccccatgtcccgccaccagtttttgacatcttggagctcatggtccacccttccttcccagcatcatttttcaataccctgtcatagagcatcccagcaatagaacacaaatggcaaaatatcaccctcttctcagtcctgttgcttctctcaccacctagttagtgtcctggtgttgtcccaaggcccagtagtcagggcccaaatccaaatgtagaattagcaatggtctctgtacactgggcttaaaactaaattccagcattaaggaaatgcctaactgtataattacatgagacacagagagtctcacattggaagaacttaatatatctgagcagaagaagaaactagcccaacacaaagccattttacatctttgtaaaacaagacaattcaataaacatgacatcaaggggaatgagtcctctggagagggcagaagcctctttcacattgatgaagctattaagatgcaaagaaggttgcaacttgatttctctgtttgcaagcgctatttttctccccaagcactggtttctttaattttcttttttccctgaaacactaattatgccaacctctttctctactcaaaacctgaccaaaccttcaccctgtctcacacttatgaccctactacgaaccctccccaatcaggccagtccattccctgtccatgtgctagaattttaatatatatgtattagtttgctaaggctaccgtaatagagtatggcagccataaccaagtaaccataacaaagtaaccacccagtctgagtggttaacatgacagagatttactgcctcacaaggctacaagtctgatatcaagaagtccacagacctggttccttctgaggatggtgagggaagggtctgttctaagcctttctccttggccactcaatggtcatcttctccctctttcttcatatcaccttctctctgtatccacatttcctcttcttataaggatatcagtcctgctggattagcacctaccctagtcacttcttttcacttaattacctctttaaagaccctatctataatatggtcacatgctgagtatggggattaggacttcaacatatgaattttgtggtgaggggacacaattcaactcataataatactctctagacatggctttctgattggtttctggaagatgagttttatttcccagctggctcgcacattccaccaatgtgattcatttctgttttcacaaaacttaatggctagttgacttaatatttaaaatttgtaagctccaagaaagaagggactgtacctttcttgggagccagtgctaatcctagaacaatatctggcacatggtaggaatgtattagatgaatgaataagtaaccagaatgttacacagtgggattacatccctctgaccttccagagactggccttctttctagagaacaacctgaccttggctttcactgtaagagagaatgcttctacatttctgataaacctggtatgttgtaaatatgttgcatcagccacagaagtaaacacatgctagcaacaacaggcagtcaaaatactctttaagtgtgattgaatagaattctgattatacagtttagccaaggaagtcggtccagctcagcaccaattttcactgtcaaagccaatttgagcaacttgggactgaggtttaaactctcaactgccatgatgtttctgcagggccatgaatcggtgtcatagctttaggatattccactcttctgccacctcagcagaatgatcctggaaataccctaaagcagtgcattacccaaaatgattatccatgagtccaactgggaccaactccctatcttctacagggcatggagatagattctaattagtagcagaacctgaagttaagagttcctcaagacacatcatgactttaagtccttgctatttgtgtatgtatatagatacttaaatattttttgtagattttttaaagcatatgacatataatttttgttatacatcggcatatatatttatgcattgacagatgtaccatatttatatgcatgtttacaaatatatgttttcacgtatcatgtgttctttttagcctctacttcattacccctacccccaaatattaccaattaacagagaatttgaattgggaatcagcatcaacaaaatgtgacaacatcgaatggagctaggagggacagaagcagttaaagcaaagaagtgcccatgtccctggttatgtctatcattatgacgtgctcctctccatccaaaatgactgacgggcctgtaatttgttgttgctgttgttttggcacatatttgcagaaacaaacttgttcatggtccccctgctgatagctcaaccatgcaagtgccataggaaacagactttggcatttgagctgctcacagtctgggtcattcataaaagtttaattttctaaaaatattcagtgaggtgcttttcctgaatgagatgacttctggttcatcaacgtatttatgtgagtaaatagaaggcagatcagtaagtcaggaatctaatcagctatcatccagtccatctggtttaattagaaagcccagccgctcacaggcaccttttagtaaaaggcttcagtactggttccagaaaggcgggggtgcttctgaatgtggttacaaatgcttgccatctcccctgcctccacagagccccttatcaaactcccatcacagaacacacttgaaacatatcagtgcatgcctcttaagggcatgcaaatgaagctaaaatgtggcacaggggaaacaccactgaacatcacggccagtccctcaattcattcgataagcatcaacttaagcaccaataataaatatgtattggtgcttacgctattccagagactgtgtgaatgagctttggactaaccctggttggggagatcaggacgtaaacagataattcccaaactctgagatgcactctaaggtattgagggagccccaggactggaaacctgctgagctgactctggaagggcacttgggagcaaatatggacagaaggggagcaaggaaggttatagccaatagtccttaaacatacgcatgcaccaaaaccttggtgcattacaaattgtgggtcccaccctcagagtttctgattcaggaaatctggggtggggccagaacattttcgtttctaacaaggttcctgctgattctaattctgctggtttggggaccatactttgaaaatgggctaatagggccaacccaggctcacactggaatcaactgggagctccaacagctactcaagcctgggtctcctctctggagtttgtgatttaattggttttgtatacaaactggatatcagggattttgtctgtgtgtttgtattttaaaaatgtcaaacttacagaaaggttgcaagcacaacataaatcttttttttttttttattaactgagccatttgagagtaatttgttgtcttgatgtcccatctttctttgtagtgtattttcttacaaataagaacattctcctacataactaaaatataaacatcaaaatcagtaaattcgcatcagtacattacaaccactcaagttttggcaaatgtacccatcatgtttttgatagcaaaatgatctagttcaggatcacaagctgcctttagttgtcatgtctcttcttcctcaatctgaaacagtttatcaggcctcccttgacattcataaccttaacacttttgaagattacaagactgttattttaaaatacgtccctcaatttggatttgtctaatgtttcctcgtgattagatgcagctgtacatctttggcaggactatctcagtagcaacttcttactgtaccctatgaagtggcccatggtttctgtgtgtcccattactaatgatgtttacttgggtcacttgatcaaggtggagactgtcaagcttctccactgtaaatgtactcattttccttttgtaattaataagtcctttttgcagagttctttgaaattatgtaaatactttgtcatcaaactatcaattcattaggtaataatctgtatcacaggaaatcatggtttcctattttgtatattaggttataatctgttactatcattatttctttgagaccagtgtgggcccttcaatctggctctgacttctgggtttttaaaagctttttgggtgattctaatgtgcagccatgcttaagaaccacttctctaggtagaccaaagcacctatattcaaaggatattcacaggattgcaggcaacatgcagcagcctcagggaactgcaaggttttcagtgtggctggtggacaggatggagaaggagatgaagacagggagagattcagtctttagattcatctgagcccagacagcctgatcatcattatctccgatgacagcatcctatccctctctacacaccaagctatcactccatacacgatggtggtactgcctcacagttaggtacatggttttcagcataagggagggggtttgagttcctgctccaacacttcttagctctgcaaccttgcactagtttcctgttatgggctgaatgtttgtgttcccttccaaatttatatttggaagccccattgtggctgtatttactcatggggccttgaaggaagtaattaaggttaaatgtggtcctgtgggtgatgcctgaatctgataggattagtgttttcgtaagagataccagagagctcatgtatgtgcactcttgcacgcgcactctctttctttctctctctctccaaaaagaagcggggaaagaagaggtcctgtgagcacacagccagacggcagccgcctaccagccaaaagaggcctcagaatgaaacctaccttgctagcaccttgatcttgcacttctcagcctccagaactgtaagaaataaatggctgttgtttaagccactcagtctatggtatttcccatctgtaaaatggatactaatggtcctatctcatggaggtcttgtgaggtttaaatgagaaggaaacaaagtactcagcatgctctctggttctcagtaaaggcttaacgagtgtcagctattgcttcacttgtcctcaaacacaccctgtacattcccacttctctgcctttgttcatcatcagttcaattccgcaaacattatttcagcaagtccccactgcgtgccaggcattgtatgaggtcctggggatatagaatgcaacaagacctcgtttcaagtccaaagcctagagtgaagatgctccccactgctggccttggtgaagctgtttcagattccatttggaataaagggactgattcacaagaggaaataggaacttggtttgaaacctgtttcacagcattgggctgctgagaaaatgagtaaatcataggattagatccaacaatttctcatagtatcccttggttttatgatattcatatggtaataaagccctctccccagcttaccagtaattatctgaggccctccaaactaatacggttgtgtattttttccttgacgatcacagagattttttttccctttgtgttggtctcaggtataagaaaatcacactctaaaatgaaaagaactgtgaagcaattaagcaaaaatggaagggccttcctatgctccagtgaaattcagacaggagagagacagaaacattcctgagccacgtgcaatcatcacttatagcaggggttcaactgactcatgttggaagaaagcatagtcataattttatacttcctttgggggcataaacagagaagtactttctttgtttttggatgagaactaagttaggatgagggagtcaaaatgagtttgagaagataaaatatgaagagtccaaaatgtcacccaaagtccatattgaagcatggaaagggacatcatgccatgtgttagaggaaactcagctttggcttggacacttttacagaagccgccctcctctggactcccctaacactgcatttgtatctccactactgcctttcccgatttcctctttgctttagagtgtttgagtatgttccctcctagacagtgagttccttaagggagaaattcctctctcatgggtccttgctggtgtctcccatggcctagcacaaagcaggtgcacactccccactcccaggcccgcatgtccctaactgcagtgggtggctgggcacacggaggatgcggatgtccaacatttggccttggatccagacatatcgtgcttttccctgctgctggaaattcccactctgtatggtttttcttaatatctctgtgattcttctcctcactccattgcaatccttaaatatttttcctcttcccctgtatcattctcgacctcagaactaacctttctgtttatagccaccaagctcccttttcttcctttcttaaagcatttctgcaaacctcttaaaagctcttttacagacatgaatggtggatgaaagaccctgcggaggtgttcactaaagagtcacattctccttccttttggccagtaagaatgtttaggagagatgtggatgttccttcagttcacaggcagaacttgctcacattgggccagagagagggtgtggagctcctgacactggccctcccaccattgggctgtctgggccagggcagtggttcccaagctgcattccctgaaacctgaagcttccttggccctccaggcctaaggagagaacaagaatgggagaggagagtggatggggtcatgcctcccgaattcatgcttcaaacacagccactctgccttcatctgttgtacagattaggcttctctaagagatccgggaagaaaataaaaatggtgccactgctcaaatattttgtaagccattggagtagtgggaaaaaacagccagtcagatcaattgaatgttggcaaatccttcctttaagggtagattggatttgcatattggaaaccatcaagagccacttggagtcaagcctggtgaaaaaataatgtgagcacaaggaataataataccactggaaggcaaaacaacaaggacaacaacagcataaagagcaggctgcagctatgatataaaaatacgcatgtgtatgtgtgtagctcacgaagcactcccgggagaaactccccaaccaagcatctgtgatactgttggaacaagcacataaactgaccttacaaggtgatgacactgaagcttggaactcactggtatgcataaattctcctgttcgttatgagtatggctgagtgttcgttatgagtatggctgagtgtgtgtatgcatgtctcactgcacgtttcactattttaaaataaagtccaaaatttctctagtctttggagaaaaaaaatgcctcgtggtgtttagtctggatttaaatgctgctccaatgcttactggctgtgtgatcccaggaaaatcatttcaacttttctaagctcagtttcatcatctatcaaatggaaataataatattacttactacatagggattttgagaagtttaaatgtggtaaagcatgttgattcgtcagcataaggactgacaaaagaataagttctcttaatagttgtggctcttagtattataattgctattatcattatcctctgacctgagtatacctgactccagcatacctggccagaatgcattcaagatccccttctctcttcagttaatagatgaggtctttaattgactgagaagcatttgggagaaaaaaaaaaaacaatcaatgaggggcaactttgctaagtcatccgatgactcatgggaaatccggaattagaacaaaaagtagaggcagtttggtcagcagggcatggggaggacacgcatttaagccccatgtattttggtgtgtggagacgttgaaaaaagaggtagggagggtcctggaaaggaacatgaaagatgctgaaacctgagggcatcttaaaatcacaggttcactcagtgtcagagtgagatctgtgagaaccctcattctagtctacacaccgtgaggcccagagaggtgaagtttcctgcccaaggtggcccagctcctgggtggatgagcagtatttaagcacttgcttatctcctgattcaggagccactgactttttcctgccacctacccaatttctctgccacccagagggctctgtctgagctaaaagggtttatgagggtcgggcagggtggctgagcagccttcgcccagtgctctgaaaatgctctggtttttcaagtctgcagcctcaaagcgtagcctgcagtagttctcctgtctcaccttctactaaaaatgttcactctgaaacttgtaacagtggtgacctctgacaaacggcacatcccagctgttaacattattcggcttacaacagaagttgccctcacgacccttgtagccaggcccagggaggaggtgacactgtcagggccaggcctcaagaagaacaaagagaaaactcaccttggcactcaaggtctgggaacggctggtggctcgatcaggctccctgcaatcactcccttctgtaaccgtgggtcggagacatgaatgctgcctctggactcgccaattaggcccagccatggggctgcggagccccacacaaggaaaccctattagcaattagctgatggaggatcactttataccagggcttatttttagcacactgtcaccttttcactggggccaaaccttttgtatccaatccatacctgagttgcaagacattgcatttcaaacctctgttaattgacttcattagttaatgtgctgctccttgaatcccgggggtaaatgagcagatgaagaagactaatttaaagaaagtctgcagacaacagaggaggagggatgcccctgcccccaccctggcccccgtggaacccacgtcaaggagcatcagattctccccaggcttaactccattagtcatccctgagtcctctaatgagcttaggttatttcctgtttttccaggttttgatgaagggagctgtcataggaaatatgaagactgtgtctgtatctgaaccccaaagcagctctcttcaccagcacccccttgccagctcatttcagttcagttgtttcacctctcaggctccttgtctatacattgggaaaaattgctgcctcacccatttctccccttcacacagccagccaggtagttctgaggagcaaagccctgctaaggagagtgtgattagctccctggggtgataatggaagtcattcactctgctttttctttgtggctcctaagttatcaggacccttaagagccaaaatatatgaaaaatttgttctggagttttagccctctaaaggcctcattcattccacgtgcactgagtctgtgccaggttccttgtaagcggacaggtatagagaaatcccaaacaaggccccccaaagccacagatgagtggcagcatcatacaacttaaatgccagggcctggcctcatcctagaacagcctccaccccagcgtggggcaaggggaccaccgtatcaggtaacttttcctgaaggaggggccctcacagcttacagaacctttgcaaacaaagattcagccagtgaagaaagggaggtggctttcctaggcgttgaaaagaggatggggaaaggctggcacatctggggaagggcaagcaacactgttcggctggacatggtgaacaagtgtggacctgaagaggtgggatctgggcaggtgggccaaggccagactgcagagagcccggaatctttcctgaatgggaggggagctgagaggctactgggatttcaacaagggaagaagcatgatgaggcacacgtcttaaaaagataactgtggagagagtcaagggcggaaggggcctgggcagggtgagcacagatgcccttggaagctgctgcacctagcagggcttggggagcaagtcgcctgggcagggagtaatgggggcctaaacaatttcaatccgtcataacatacattgtgaagatatgcaaagctttagaagtgagatccgaaaagagaaagcaggcaaaccgagtactgggtgcctgattctaggaaggtgtcccggtctgccaagttccttcccaggctgagtcctgtcactgtcaaggcatcttcctggatttgtcaagtaaggcttgagctctgacagaccttctggaagaagtccattttcagtttgccagacttaaaaaaacagtaagaaaattggatcctagaactcactctggagaacactgaaatgaacatgtggggtcctattcagaacatgtttgccttgagtgtatggaatctgggtcaccttcactgaaagcccctctccctcggaggctaagctggatttctggggccctccacttctctccaggaagtgaaggtaatcatgcgtatgtgtgaggagtcagaggatgaagagtgaatgaatggaaaataactgatacagtgttaggctgggcacaggaaacgggagacccctaacagagttccctgattcttacatgcttgacatgtgtcccctcttacttcacagccaccaacactaaacacatgcacacgtgcatacatacatgtgcatacacccacatctcagttccaactctcagctaagagttggcatttgcattttgtgaggttttcttgggaggggacctttccagagagccacagatccccctacactcatctcttctcctcacctaccagcagggactggcttgggccatataagctggaggactcatgtaacttctcttgctttaaggtactttgctggaggtggagcaattaatccacaactcagcccagggaagcagacagcagatcgtcatttcactaatgagattgctgagccgtggctcggagtgcgtgggcctggccaggtggagacttgatgctggcaggaggggcgttagaatcctcacctacctaagcctgtggtggagcaaacagccctgcgggactcaatgcgtgtaacccttggattttcacccaacagttctgcaagtctctttcctcaaataaaccatcccccatctgcataatatggaagctaagtagatcgcccacaaagaaaagagaacaatcctgtataaaatgaggaagccagactaaataattccaaagtgtctttaggcaaatgcagaccagaatacagcatactgaagatggatccttctagacccactccttctgcttgtctggaaagcccaggcctgccagcatcagcggcgacatttcaattctgccagtttgatcagaccacgtggattttctctctccaatacaccagctgataatgaagagacaaatgttagctaaggcagccctggtcaatcccaaagtccttagatgcaaaagacagggaaggtgctaatcatctcaggaggagaccccagacgggctcattaaaaccattataagaaatccctatctcccccaccacacctccaaggaaaccctgaccctggtgagtgagcagggattgcaggggcttcccttgcaccagttcttttggcttaggagggaggacatggcccagctcacccaccacctgcagcagcaacagcagcagccattacctttgaaataatcctcgctcgcacaccaagtatttgttatgagtctgtgcctggaagtaaatatcacttctgtttaggtgaccatgtgtcctgggtttcccaggacagtctggtttatgcctgttgtgctgacacacatatgattagtacctactgccatgctgaaaagcgtcttgtttgggcaataatgtatgtggttacctaagctctaccaagttgtttcaaaactgattggagggaaaaaaaaaaaaaaaacctatagcgccaccaacaattaaattataagattatttttccaagatcacagtgactcaaagttttccctcatagatgttatatatttagtttgaggtactggtggggagggggtcgtaaatgcaattcagtgttataagattagacaagcaagaatggtattctgtagccttacgaaatcacaaacacatgtcagtcgtcagtttaacaaaggatcctctgtttaaaaataaaatgttatgctaaaaacaaattacatttaagtaagtatataattatacttatttttaaatgctttcctatgaaaagaaaggttttcctgtttttttaatgagataccattcgataatataaaattaaccattttaaggtatacaattcaatagtttttggtgtattcacagttgtgtatgaccatcaagactatctaattccagaacatgaccccaaaaagaaaccccatagctgttagcagacaatccaattccctctccttcatcccctggcaaccactaatatattttctatcttgatgactttgcctattttgaacatttcctatgaatggaagcacactgtatgtgtcatttcatgtctagcttctttctcttagcataatgctttgaaggttaatccatgaggtagcatgtatcagtattcccctcctttttatagctgaataatattcctctgcatggagataccagattttgcatgcccattgatcagctaatggacatgtggtttgtttccacttttttgctattacaaataatactgctataaatattcaatgtacaagttttcatgtggacatatgttttcaattcttggatatatacctaggaatggaactgctgggtcaaatggtaactctatgtttaattttttgaggtactgccaaactgttttccacagaggctggatcattatacattcccacaaacaatgattacgagttctaattacttcacatcttcttcaatctttcttattttcttcatcatcatcatcatcatcatcaagatcatcaacatcatcatcatcacaatcatcaacatggccagcctagtaggtataaagtagtaccttactgtggttttgatttgcattttcctaatgaataattttcatgtgttctttcatgaacatctttttgcagtggctttttgtgtatctcctttgaagaaatgtctattcacaccctttgcctattttattttaatttaatgattcagttgtctttttgtagttgagcttcaagagttcttacatattttggatactaatctcttacaaaatatcctatatacaaatattttatcctattctatgggttgcttttcactttcttggtagtgtccattgattcacaaaagtttttagttttgttgaaatccaatttaccaatttttttcttttattgcttatgtttttggtgtgacacttaagaaactattgcctaatccaaagtcctgcagatttatacctatgtttctttctaagagatttataactttagattttacatttaaatctttcatctattttgaattccttttttgtacatagtatgaggtaagggtccaacattattcttttgcaggtggctatccaattgtcctggcaacatttattgagaaatttctctcccatttgacacccttgttgaaaatcaattgaccatacatgtatgtatttctgtgtggactctcaattctattccatcggtccatatgtctatccttatatcagcactacactgtattggtaactgtggctttgtaataagttttgaaatcaggaagtgtgagtcctccaactttgctcttttttttttttttttttgagacggagtcttgctcagtagcccaggctggagtgcagtggtgcgatctcagcttactgcaagctctgcctcccaggttcacaccattctcctgcctcagcctcctgagtagctgggactacaggcacccaccaccatgcctggctaatttttttttgtatttttagtagagacggggtttcaccatgctagccaggatggtcttcatctcctgacctcgtgatgcacccgcctcagcctcccaaagtgctgggattaaaggcgtgagccaccgcacctagcccttgctttttttttttttttttttttttccaagaatattttggctatccaatgtccctttcattttcatttgaattttagggtcagcttgaattttaggatcagcttgaattttagggtcaactgcaaaaaagcagctggaatttgacaggattgcattgaatctgtatatcaatcaggggagtattctattttaataatattaagtcttccaatccataaacatagaagatgatttctttcaaaactcttttgtagttttcaatgtataggactttcacttccttggttaaatttattcataactattttataatttttgatgccatttcaagtggcatcactttcttaatttcatgtttggatttttcattgtaagtgtatagaaagacaactgatttttggatattgatcttatatcctacaactttgttgaactcattaactctaataatgtgtgtgtatgtatgtgtgtgtgtgtgtgtgcacgtgtgtgtttctttaggattttttagaaaatcatgtcatccactaatagaggtagttttaacttccttcttctaatctggattctctctttctctcttccacttctctcatttctaactctctttctcatctaattgccctggctaaaatttctagtaaaatgttgaatagaagtggtgagagaaaacatccatatcatgtttctgatattacagggaaagcttccagtctttcacagttaagtatgatgttagctgtgggtttttcatagatgccttttattaggtttaggaagttcccttctatttctagtttgttgaaagtttttatcacgaaaggatgtgagatttggttaaatcctttttctatatctattgagatgatcacatgggttttcccctcttcattgtattaatatggtatattgcattgattgactttcatatgttgaacaaactttgcattcctgggataaattcccattagctataatgtccagcccttctaatatgctgttggattctgtttgctagtattttgttgataatttttgcatttatattcataagagatattagcctgtagctttcctttcttgggatacctttttctggtttaagtatcagggtaatactgacctcacagaatgagttagaaagtgttccctctgctatttttttggaaagattttgagaaggattggtgctaacttttctttaaatgtttggtagaatccattgatggagtcatctggtcctgagcttttctttgttagaagttttttcttgctaactcaatatttacttttataagtctattcatgtattctattttatcttgagtgtcagttttggtagtttttatatttctaggactttgtccattttatgtaggttatccagtttgctggtatatagttgctcattatattctcttaaaatccttttgtatttctgtaaaattggtggtaatgcccttctctcattttttaataactttactactttcttttatttctcttcatcagactagctaaaggtttgtcaattttgttaatcttttcaaataaccaacttttggttttgatgattttttttctattatctattccattgatcacaactctaatctttattattcttttcttctgtttgctttaggcttagtttgcttctctttttctagtaacttaaggtggagtttaggttattgagttcagattttttttatgtaggtcaggtgtcatagtgacaaactatctcaatttttatttatttggaggtttcttaacttctcattcacttttgaaggataattttgcaagatacaaaattcttggtttacagtattttttttttttcagcactttgaatgtcatcacactgcctttggcctccatggtttgtgatgagaaatcagttgataattttactgaggatttcttctatataataagttgcttctctcttactgcttttgagattctctattcgtctttgattttcaacagtttgattatgatgtatctcagtgcagatctattctagtttatcttacttggagttcattgagctttttgtatgtatagattgatattttttatcaaatttgcaaagtttcaccattatttcttcaaatcatggttctacccctttctctctcttctctgagacgctctttatgggtgtattgatgggcttaatgtcctccggtctcctaggctctgttaatttttcttcatctttttctttcttgttcctctgactggatactctcaatttacctgtttcaagtcttctcattctttctttggtctgttcaaatcttctgttaagcccctctagtaattttttcttttagttattctacttttcaattccaaaatttctatttggtcccattttataatttatatctctttattggtattcactatttggtgaggtattgctctcataacttaactctttagacttagtttcagctttttgaatatatttacaatagctgatttaaagtctttgtctagtaatgaactcgttttcactttctcactttctcaaagacagttactgttgattgctttttttttttctcctggtatgtgccactgatgtttctttgcatgctttgtaattttctaattgaaaattgaagattttgaatatcataacctgggaatcagattctccctcctctccatggtttgctattattgctgttattttatttgttgtttattcacttttccgaattacttccataaaatctgtattctacgtcatgtgtagccactgaatgcttagttagcttagtggccaattaatatttgaatagaaatatccttcaacacttggaactaataaatcatccactcctagccaaggggctctgtgtccattgtgtgtgggggtgggaggataccttcaacactcaaccaggcagtttactactcagcctttgccttcacttcctgattatgcgtagcctaatggccagccagagttaagagactggggcctgcctgcatttttcctgagtgtgtgcacagccctggacatgtgaatgttcttctaaaatcttaagaacatgtaggaccttttcaaagaccttattccctacagcatgtcattccctagactttgcttccaagttttttggctagtctattgtttcccccaattgttatccattgccttagacagtagagaagaatgtttagaccgtgctcccttgggagcagcttagtataaagcaagttctcagtcaggagagataaaaacatgtgtctagtagcatgtcttcaaggcagccaccagatagatcaaattagaattttctgtaaataaggtccattctgctccctcatatgcctgcactgggaatgtgggttgttatttcaaggctgctgctgagctggggattggagtatgggattcagataagttaagacaccacagttttgcttttttcattaagaattgactaaggttttttgtttttgtttttaaataaatgcttcccagagtacttcaagtatttggttacattccagagttctgaaaaagcacattctgatggttattgccactttttttctagcttttatagaagggtgaacttttgggattccttattccaccattttctctgacattacttgttgttttgttttgtattttcataaaggcgaggcacctcctgcttctcctggatgtcatgggaagccagctacctttatagaccttgaagaagactggcgggtggggagtgggggttgggggtttctaggtataaaccaaaaattaaattcttagtgccaccccctactacaaccaactgaatggcccctcctctcagccaaagggatttcaaagaaacctgcaaaactagttcaggccatgataggaaggaaccaggaaagagtggttggacatgtttcattatactctgttccctttggcatccaggcacaactgaccagcattaacaataaaacagagatcttaagactaacaaaatagactctttgtagcaataagataccaaattccagcctgatgctagtatagcgtcacatgacatagcaggtgctgaaagtatcaaagtgttttaccccaaaatatatttctttgtcacattttgaaatagccctgcaaagctgtctctggtggggaaaatttacattctatagagaatcctcttccctttctagttttttcctgatctgggagagattttaactaagagtctggcaccttttaaggtctgatgagagacatacaccctctattctgtctgaagcctgctacccagaggcttcatctacataataagaaccttggtctccataaacctttatcttaacccagacactcctttctattgattccaggtctttagataagaactctttcaaccaattgccagtcagaaaatctttgaatccacccatgacccataagctcccactttgagttgtcccgcctttccagactaaataaacgaatgaatacatacctcaaatgcactgattgatgtcttatgtctccctaaaatgtctaaaaccgagctgcaacccaaccaccttgagcatatgttctcaggacctcttgagactgtaccttgggccatggtcattcatatttgattcagaataaatctcttcaaatattttacagaatttggcactttttgtaaacatagagaagaggcagaattcataatttttgatttgtatatttcatagcaaaattgtaactctgctgtgtttttaactcctaaatactcctggattggtaatatactggggataataccaaaaactgtttctgagaatatgttagtaggataagaaccaagatgtgaagaacaattacagagtttctcatatacaattattttctgattcactttataagaacatatagcaccccgattgagtaatgataattaacaagatgcttttgttcctttaggttttaaaaattacactttccctatgaaactagatttaagcaatggaatatcttcaggataatactcacaaagagaggttggagaagggtgcattctacatatatttttgttgtttttaaaaaagaatcgtgacaatagtaatagcaattaattgcttttaccaataatgctactaattattttaattatttaatattagtataataataatagttattattataattactactgacagttacctacttacaagtcttattggagagagtgggggaatgtggacacataaatacacactatctaatgtctacaaacaatttacacaatataggaggtaacatacacaaataataaggcactgtctgtaataaccagtgctactcaaagttcatttggagcagagctgatttgcaagcttgttgttattggtttgagacaagataaatacagaaattgagagtagtgtttagaaacttacagcactttgacaatggggcacataccctccaaagtgaaatgtgttgtctgtgacgtttaataataataagcctgggcttggactacatatgtctttttttttttttttcctgtttcattcttctggtaactcattttgattatttccttctttaacaaaagtattggtctgcaatgaattgggagggagaggggaggaactagttcttcactatagacaaatgtcagtttagaagatctatgctgtttggtttgggaaatgaaaggtttgggctacatttattgtttgaatttggagggacagagagattactagggactagagtggtttgagcaggatttatggaacaagtgtgacttcacattgttacaaattataggtgaagaatgaaggaacattccaggatcaagtttcctaaaatttggaaataaactgtggaaattctcctaaggtttgtatctttcttgtctgaatctaagaatctttttctattatgatgagtgagatcaggaaatgaattaaaatattttaatttcctccttggttttgaagttctttaaagaagggatttagaatttaaatagtatggttattagtatctttgagtgaaggagaaagcgtaaattaaatgtcgtctcattttttaaattaggtagaaaagcttactcccacttaagaaaaagaagaactaaattaaaattcgtttcgccctgagagcaatcagtatatctaatccaaattgagaaaaatgaaatcctttttaaattttagtacctgtatgttcaaaagccataattctgtttggaaatctatgaaggtatatttttctcacatacgaaaaattaatcttgtgctaggtaagaaactcatcctctttttttttttttttttttttgagatggggtctcactctgtcacgaggctggagtgcagtggcacgatcttggctcactgcaagctctggcttccgggttcaagcaattctcctgcctcagcctcctgagtagctgagactacaggtgcgcgccaccatgcccagctaatttttgtaattttagtagaaacggggtttcaccatgttggccaggctgatctcaatctcttgacctcatccgcccgctttggcctcccaaaatgctgggattacaggtgtgagccaacgcgcccagccgacatgttttatttaaatcaaggagttctcaaaaattaagagtttatctgaagatttaaattaaaacttccacagtatttgaaggctgtgggaaccacaacggatccgaatcaagttacttaaacttagcagtgaaaagtccctgggccctaagaagctaagacttcctggtggtcccacagcaagacataagtaggtgggactagaatataggaccctggattgagagtaaaggtagtacagtcaactgatttcttcttttttttttcctggagacggagtcttgctctgtcacccaggctggagtgcagtggtgagatctcggctcactgcaacctccaccttctaggttcaagccattctcctgcctcagcctcctgagtagctgggactacaggtgcacaccaccacacccagctaatttttgtatgtttagtagagatggagttttaccatgttggccaagctggtcttgatctcctgatgatcagctaacttctaatccaacatccttacttttatagtttcctatcactacaattagccccttcagacatgtgcttttcgagttcctgaacaatttgaggccacctcttcattaattggccaaagttgtcagtgatcataccaagttagacagaggtgaccggctaggtgagaagctggtaactgtctttggccatgggagctttagacatgggctcatctgaggacaacacaaggttatcagggacagggtgaaggctttctttcaagttcacagtgcccagacacacagaccctgagtttttgaaaggctctgaaagtgcttagatcataaagcacacatcacatgctgtagttgttgtcattgacctgtgtttgtctctaactgcatgaaaactctcaaagctgtcacatgggggtcaggctgggccagtaggattgtagaagtacggaccaacttccacgttttcctgaagtatctgctctgtctcagtttagggggagacagaaccacctagaatcactgacaccttgattcaacacaatccgcagaccgggtgattaaataaagcactttggttttttcatatgtttgtttgttcattttctttgcctgtcctccactcaaagcactttggattcagctacttcggatgtccagtaatgccaaacattcctggaataagactaaacttgcctctccatggaaagactggtaatcacataacaagggatatgatgatattggtagcatgctgaggtcagctgggtagactgatgctcagaacagatttcaggactaaagacatggggttataatgtctcattatttcttcccatgccacatggatggtgtctccttattgttgggcacgtcattctcacctccgtgccttggtcccagctgttccttctttcctggaggacggtctgtctaatcataattatccaagacagactccagattatccaagtctgcttattcttcaaagctcaactcaaatcctaccaaaacagtactgcatgatgggaaaaccatggacttcgaggttgaccagatctgagatgggcaaacaacctctctgaatcacagattctttatcataaaattctgggtcatagtgaggattaggggtgctcaaaaatggtaagtattacaactttcattattccagccaattactgatgcccttctctcattaataccaaaaacctgagacttataaccacatccttcaggatgtgtatgatttgtacaacattttggggatttcatcgtctccccagacattcttgagggcagtgaaggcacctcacttctttgaaacagagattcagttacactgagtatccacttagggagcccttgctttgtgataagtactgggctgccttcatttaactctccaaagagtcctgaggaagcaatttttatctcagttacagacaggaaaactgaggctcagatttattggttgcatgtccaaagctgcacagctagcaactggcactctgatcttgaaggcaagccctctttacctacaagtgctctccacacagaaggggctcaagtgcaaatactgattgatgggctggatcccactcatatcgctggtctaattgcatccttttcttcgtggcagcttggcctgctgtcccctggctgccaagatgttcttactcacactgctctgccttcactcttgccattgtgttgagaatccatcaatacaaagctgtacaattctaagtacccaggaagtgagcagaccatattgcacagggcaactaagtggtaagagtgaaaacagcgtagcagacggaagccctaagcaggtcctccaggccagaaggagggttgggagagggaagacactgggggcaagtgacagattacctaatcctagaaacaggtagaaatattaattccctttggggtagaaagtcagaagcaaatgtagctacaatcagtcatagcatgctaatagccaggaagtcacatttgatgctcctggaaatagactgctcacctcgtaggtcagaaggcaattacctccattcagctcaggaaatgcctatttttcaaccagtgagcataatgtttggggatttttgctcatctgttgttccgcctccattggaaagaatatataaaagtcatagccaaaggcaaaacacttgccccgctgacaaacagcccattgaccatggcaaatcctctactgctaaactattagaattacgactcgctgcttccttggcaaatacctgccctagatgaagtgctccaaacgctgtagctgtctctgtctattcccacccctccaaagactctatgatgtttaaaggccacctgaaacattctcaataaggtacacaatgcagtttaacagacactaacatcttaaagggctgacctagatttatctactccaggtgcacagagattggtatgtgcaccccactccccatttccacttacttttcagttgaaactactatgatctcactgtcttttcttttacaccgaaggaaagaaggaatcatccagaaagggtgcgggttgtggggcgggcacagtgataaaggcagaataaagaaagaaaagggtattttttgaatgtccaccatgtatacatcatcctgatttaaacctaatcaccttcagggaaaagtattcttattttatttctattcaggtgaaaggtccatcagatgcaattagccattttaaagtgcacaattcagtggtatttggtgcactcacaataatctgcaaccactacctctttctagtttcaaaacagtctcatcgcccctgaaaaacaacccatacttattaagtaattgctccccatccccttctcctctcatgtcctcttaatgactaatctgctttttgtctctatggatttgcctattatggatataccatataaaagaaatcatgtaatatctgaacttttgtgtatggtctttcttttagcttaatattctcaaacttcatctaagttgtagcatatatcagtacttcattcctttttatggctgaataatattccattgtatgtaaaaaccactatttatgtatccattaatcagttgatggatatttggatggtttctgctttttgtctattatgaataatgctgctctaaatattcaaatttctgtgtgaatatatgtttttcttgggtatatactcaagagtggaattgctgctttacgtctgctttaagatggggaaactgaggcaggaaccctgcctgaggtgatttagcttgttcgtggtagagtcaggattggaatctagtccagaccactccaaaaccactttttttacttttgtttttataagaaaagtagtccattcacaggtccatccactatacttagaacttctctggctaaaaattcagtgaataactatttttgtcagaaattactaacttttactctccactcaaacaccctgaggtcgagtcaggattggaatctagtccagaccactccaaaaccacttcttttacttttgtttttataagaaaagtagtccattcacaggtccacccactatacttagaacttctttggctaaaaattctgtgattaattatttttgtcagagattactaactttccactcaaacaccctgaggtcatatgattaataccactaatttgaactcatggatccaatagtttcatttggttcatgctgagatctgagctttttgtttcccaggaaaatcaatagcagcagactttatcttgttagatcaaatataacttttatttttaaaagctccaattatgccctaatgcactgtttatgtactcagagggcttaatgagataataaatgaaattttaatttgacaattaatagtataaaagtgttaggatattttgaaattaggaaggcttttgtgtgattttcttttcttattagcccttgttttaggatataattatacttgtgtcacattatgactgggcagcaactcaattattaagaagtagaaaaatgagtaaatttcctactcctgtgccttttgtagcaagttatgaaaacaaaataaaaagtaaaatgtaatcagaaatgctaagaaatggtgtaattctttcatttccaatcattcccgggtaagaaatggctgatcaaacagccaatacctttatcatgaatattcttcaggaatgtaaactgataagacagcagatcctggaagaacttgggttctcggaatgaggcaacggaaaatttaaaatgtgtgaaatatgttacatatacaattacaaagtcatttcctcacacactgtgtatgcacacacacacacatccaagcccaaacacccacacctacagcatgagttttccagggttccaaaaaagcaaaaatacttggaccattatttaatacacatttactcaatatttgagggtgccaagcatgaaacattataaaggagttaaagtagatggaatctcaaaatacaaggcaagcaaaaatcaaattataaaccttaggtttagctaaagtgagttactgacaactaagtaaaatgttcttcatgtcaccaaatcccaagtaatctttatctatatgtcatgtctattaaaaaagcaaacaactgtttttcaaactagcaagagccaaatctctttcatttttcatttattcaataatcactggatgctcactataaaagtaaaatttttaaaaatgaatggaaaacccagtccctgttgagaagacacggactatacccaggaaataataaaacttcactcttcttctcagaaccaggtggcaagagaacagaacttcctgtatcaagctgacttctagccaaagaccaaagaacaaatatcagtaaagcaagtagaaactgtttgttgagtgagtgaatgaatgaatgaatgaatgaaataccgcagacagaataaagaccgtcggatttacttggaaactacagactgggtaaggggagactcaaatgtgggttttcaaggaggtaataggcttcagttagagaggtcaatagaggatgtttctggatcactttagacatgcaaaaattaacttgacaggcaatacatatcaaaagtcctaaaagctttaagagtgtttgtgtcttaataacaataattctaagagtttttgttaaaaaaatggctcaaaagatgaaaaaagtttaaaagtagtaaagttttaaaaaatataaaatggtatttaaaagttaagacggggtgttggcagctcacacctgtaatcccagcactttcggaggctgaggcgagaggattgcttgatcccagcagttcaaggctagcttgggcaacatagcaaaaccccatctcagccaaaaaacaaaaaacaaacaaacattatccggccttgatgctgcaagcacctgtgctactcaggaggttgatgaggagggaagattgcttgatcccaggaggtcaaggctatagcaagccatgacagcatccctgtactccagcctgcgtgacagagcgagaccgtgcctcaaaaataaaataaaataaaataaaataaagtaaaataaaatggtaaaaagttagaaacaacctcaatgtctaacaataagaaataagaacattatggtaaatgaataaataaaatcaagtctttggatttaaggagaagcagatgtgaaatagtgttaagtaaaaaagatccatatgaaaatgttgttagtactataatgtatgcttttacacattattgtattaataaacaccagagtttcaaacaaggaagaaaaatggattcctgctggaggaaatggcacaaagaaggcccacgggtttggaatgacggagagaagaggaaaaaatggaagacttgattaaaacaatttcaactagttgccaggatttaggccccattcatttctggttaagcacggagctatgatgaagttaacctaagattttaagaaacactggcacttacggagggaaatctaggtacttgtatttcctatgcttgccataggataaagggcctacacgacccatacattacaaatttgcccttacaacccatgtagggtaggtcctacagacacaacatatataagaatgggaacaaagaatagtcaagactagatcttcctatcccccacaagtgggtatccaggcctagatatagatggcaagctaccgtgggatcacttccttctcctcattgccactacagttctgagagggaagctttacctccacgatcatctactcatctgtcgtcatcccttgtcccacagtcagagcctctgacaccgtggatgttttcagagagccattcacacaggttacaaagatacaagagaaggatgtatatctggaaatcagaatgcacctgtagacattaagtaagtcaaaagtcaatctgtgctttaaatataaagtctacttcggtctggtttgagtacttaactgatacttaaaacactgatacttaaaagagaaagccatatagaaaaatggctttcctggatccgcataccaaaaaacttcaagtgcttcagcatgaaactactgatccataaattgcagaggtcccaccacccaccccctctcccaaagtgctggactattttgaaatggaaagcatgagcttctgatcaagctcttctgccatacttacttgtccttggcattggttacttaacagtgtaggtaatagctgtctatttacaatattcttattatgttaagctcagctctttcttggatagtggtaacatttccaagttgaaaaagtaccctgcaggtctctgagaaatggctaaatctgtgcattcttctagcatgtgtcatgtcccaagtattcttcctcaggcacttcacatatgggatctcactgaccttcataacattattgtggggaaggtattactgtcccccttttatagactggctaagaaacttacaaagcaagttaacgacctgggatcggctgggcacagcggctcactcctgtaatcccagcactttgagaggccaaggtcggtggattacctgaggtcaggagttcaagaccagcctggccaacatggtgaaaccccatctctactaagaatacaaaaattagccaggcatgcatggtggcagatgcctgtaatcctggctactctggaggctgaggcaggagaattgcttgaacccagggggcggaggttgcagtgagctaagatcacgccactgcactccaacctgggtgacagagcaagactctccatctcaaaaaaaaaaaaaaaaaaaaaagacctgggatctaccttaaatgttgtagatacattgttatgatcagtaccgcatttaattctcattcaaccagtccaactcctttttctaaggaacctaactgcaatcttttaaaccatcagcaaaatcatttggtattcttagacacccacaaacagtgctactagtagcttggataaagacaatttagggggtggatccctgtacaccaaaggtaaattgataaaacattttccctataatatttacctagatacataattttcaaaggaaaataaaatataatctctatctaaaaattctaagacctataaaaggggcaaaaaacatgtgttaccctcatctggtataaatgcactaagtaacttggtaaaactttgggttcatcatgaaatgagtctgggcatattaaaaattcaatgttttgtccaagtttgaactggacaaacaggtttatctctgaaagctacctcagataaacagaggtcactaagagtggttatctaagctgtgtggcatttatttatttttgcattacagatttcaaaacaaagagaacagaagtgaatggcactaatcctgatgggaaaagccctcataatttcttctttatattccaaaaacttcagtgattacacttagaggcttccaaggcgaatctcctcaaatgtagtagctgtaactgtaaatattctgctaccgattttctttaaaagaaactgaatgtaacgtaaccaattgtttgtgtaaataaccagacctacatctccattctcaagcctattcaaaacccctcccttctcctttgactaccatttcatgagccccaggaaaaaggggtctaggcccattagcctggcttcctgttgccatctctgcctttccctgcttctttgggtaccagatctttctgtccttgtaggaggatttgagaaggagaaatcctgtcctcctgccctgaagcctacatgattatagcccaggaatagcggaatgcaaaaactgtgaccagaaatcaagtggtccaagagcggggaacaggatggtgagagggcactgtaggtgagattgaaaccagaatgaagacaactcaacatacgtcttctttcaggtccttccatgccctagcccattgtaaccacaggcctgaatgaactcacaggcctccttgagaaagccaactttaccaaccttttgaagacccttcgttttaacaagtgtggatattctattggggcattggggtgtcaagggccagaaactttaaaagggaaagaaagagaagaaaatcaggaagtggtataacaaaggcctaattacaagggaggagtgtctctctacagacaggtcactggaaggatgccaatggctctcgccgcataaaggaaaagattgttataaaaagatttttaaaaaaagaagaagaagaagaaagaggcatggcagtggagactgggagggtggggcagagaatagggaaatgaataagaataatgacttaaaagctttctttttttttctggttctcttctttcctttccgcagatgctcagctgagccagtgcagctggctccctgacaaatgtggaaaaatcagccaatttgagctggttgttagcactccgggtacagaggctcagataaatgagggcctgcctcaggtgtggcagctgagcttcccgagtgttctcaaatgattctcggccagcgcgaggcctcctggccttcagggcctcatgggtgctcccttctatttcctggctccacattctgataggcgtgaccttggaagaagcatcttcctccatttgttcctcctcccctccccttcctccccctgaccaggtctccttccttcaaactggtggggcttcctcccgctcacttagtaaaaagcctatagcacaaggtctcttgtccccagacgtttgagcacagatctgatagcccaactcaagaccccctcaaaaatgcctgatgtgtattccttttcaaatcactgcattggtccacagagtctcgtgatatgctggcagaataccctggggtttccctacaagacagtgaaggcttctttgtaagtgttcactaacaccaaatagtacgccccacatatttatgtcctcattgttatgtccaccacagagtatgaatatgaaaaaagaacgcacatctgaccattctgttcaagaaaagcagtcaatattttgagtcaagttcaaggggaaaatcgttttcttgcaggtagctgtgaaagttccttgcttatcaaattgtcccctttccagtgattcttgtttatgcattgataaataaaaagaacaaaaatgaggaactaagatatttaggagcttatgtgaggaaagtttctagagggatggaaatgatctagatcttgttttttgtttttttttttttttttgagatggagtctcactctgttgcccaggctgcagtacagtggtgagatctcagctcactgcaacctctgcctcccaggttcaagtgattctccagcctcagactcccaagcagctgggattacaggcatgtggcaccatgcccagctaatttttgtatttttagtagggacggggtttgcaccatgttggccaggctggaatcgaactcctgacctcaagtgttctgcctgcctcggcctcccaaagtgctaggattacaggcatgagccaccacgcccagccctacatcttgttttaattggtggttacatgggtatatacgattgtcaaaactcactgaactgaacacaagatctgtatactttgttgtatctccattatatctgattcaaaattaaagaattttaggtcttttgtttcagtaacacattgaggtctacaccagtacaatgaagtggcagctacagtaaaaatgcacagggaatacatacattgtgtcatatcatcagttaccctttaaatacaatataatatcttcaggccgggcacgatggctcacacctgtaatcccagcactttaggaggctgaggtgggtggatcacgaggtcaggagatcgagaccatcctggctaacatggtgaaaccccgtctctactaaaaatacaaaaaattagccgggagtggtggcaggcgcctgtagtcgcagctactcgggaggctgaagcaggagaatggtgtgaacccaggaggcggagcttgcagtgagtggagatcacgccactgcactccagcctgggagacagggagactacgtcttaaaaaaaaaaaaagagtatcttcaaaagaacctaacgtaatttttacaccatcctcaaatacattttaggagcctataaagtccacagtgggtcaaaaatttttttatggaagaagagatgatattggggtttgtgtgtgtgtgtgtgtgtgtgtgtgtttgattactgctattcttataaactgaaaacaaaatatgttaggtgcttgaattggttgttctcagacgttttgatgtgggaagtactagctgggagcttggaggggagggtcaacataattggtttgtttgaattatactgatttgcagattaagtaagaatgtttgtgtgatttaggaagagaatgatagcacttcagaggtgaaaaggtatcggatttatagggtctattctctcattaaatcaatataaaaatagaggctcagagaaggaaaacaatttgtctacgaacatacagctgtctcgtgccaaacatgaatcttccgagagtcaagtctgttctccttccagttttgcattagttttattttacatgacattctctacaatattttaaagaaaagatatatttatatgtcattaactttctagaaagtaatatttttattaatattaaaaacatcttcaaaaattgtttttcccctgagaatggctgcttctcaaatagtgtgttttaaaaaattaagatagtctactgatatactcaaatactcacatttatcttcttagaaagcacccatgtatatcttccacatgatagttatggcttaaaaaaaattcaaatttatgttgctgctgtcccatctacccatctctacaatagaagattctaaaaagtgattttgtcaccagaaacccacattttctcccatctggaccttgaagtttcctttaactttgctttagtgattgggcaagtcatctttctttctgtggctttaagaattgcccatgataaagtaaaagagccataacctcaaggaaaccatttattaggcttaatcaaaacataatactcttgtttatgtcttcaacacattgtttatggagagagtgagccacaatgcacagacactatcacgatgctccggtgaagatgggtgatttaatgcccaagagcacaactgaatccactctagagaccaataggtgtggctcaaccatagcttcaaaatttcagaggaagttcagaaaccccatatgggtttgctttgctttttctattccttttaaccaaagctgccttcatcatgtataatctttctttttttctgagacaggttcttgctatgccacccaggctggagtacagtggcccgatcacagctcactgtagcctcaaactcctggactcaggtgatcctcccaccttagccccctgagtagctgcgactacaggcatgtaataccacacctggctgacttttttaaaaaaagcattatagagatggtgtctcaccatgttgcccaggcttcaccatgtatatttctttctttttttttttttgagacagagtctggctcctttgcccaggctggagtgcagtggtgtgatctcagctcactgcaacttctgcatcccaggttcaagcaattctcctgcctcagcctcccaagtagctgggattacagtcacatgccaccacgcccagataatttttttgtattttagcagagacagggtttcaccatgttagctaggccggtctcgaactcctgacctcaggtgatctgccggcctcagtctcccaaagtgctgggattacaggcgtgagccaccgcacccaccccaccatgtatatttctgacagcctcttcacaaggctgataactatgtgatattcttgacaggtccccagtgtctctctcagcttggccagggcccacccacctacccctctgtagaatctcgaaacaacacctcagcatcctgggagactggcatgataatattcgtttttcagagcaagaaccaaactgacaaggaacagccataggaggctcagatcagggctatctccgctcagtgacagggaggtctgtctctttgggagaggttgaagacagctaaactggagtggttgccagggggagagggggatccagaacacaataaacaaccacactggattctgctacagtcacagcatcccagagctagaagagagcctgaaaatcatcaagcatggtggttatcaagcagttgttgctgatgtgttcaagcagtggaattctttttgaaattaaatcttctgtggacccctggcatagaaaacaattaaaattgaggaagaggttgctgagcagtgaaaacatcctcatcgtttgatagaaagattcctctcacggcatacggagccctgaaacactgctgtgggaagtttcccaggctccatttgaacatggggttctcaaaagaacagtgacagggagctcactcccactaaggctcactccaccataggtagcccagactagcagagggtatcttcctggcacagacctggaatctgactcctgctagcttatattcatggatgttagcttacctttgaggccaaataaattagcttgtatccccatttcacatgggaaaatcttcatatattcaaaactagcaggttgtcttttagacatgcccttcattacatggcaggctgtgtccatgccccatctctcccacacatgtgcccaagctcaccccacctctgcccctgccgcggccttatcaagacttcctgtacatctgtctgtgtgtgctgggggctcagccttcacgaggacccagaggctccttagggaaatccacaggcccttgtgcatgtgaacaataaggaaaggaaaagattttgcttttgggttcttcatcccccctcccaccagcttcaaagttgaccccacccgttctgaattgagggcgatgaaaactggcttgtggccatttagaagaggatcagattctggaggcaaattctaaacagactttgcatgtgaaaagaaaataaaaacagctgaattacagacaagaaattaatctgcccctttccccctcaaaaaaaggcatcctaacagaactacttcaagattgcaagggggacttcctgcacagtaacatgaaacgtttccatcagatcaacagctggaaaagcaaagtttttttttttaagtgttaacatttcacagttacaatcgtttaacagatgtaaaattataggatatacttagcgtttaggttttaaaaaattattagctaaatatcttttggaaaatacagttgatggtgagttcttcttgatgatgatggcaagaatattttaaatgttcattacactaaagaaaaatgttcattatactaaaccatactttaatcagcttaacgtgtggcttacacaggtttacctaagattaactggacattttaaggcctgggaacagattgttctactgaccagccaactaatgtaaaagatgagaagaaccaagactgggaatgatatcagatgcaaagtgaacatcccataatcgaaacggataatgacacactggtgagtgaagggacatcaggatcacaggttcaaaggcaaggagatccttgtccagggagcatgcctgggagagcagggagaggtggtgtccagccactgcccttcaagtaggggaaaagtgagtgcagaggattgaaccagagaacagaagctgctaacctgacggaaaatagacctggtgagtgaaggttagtggaattggggtggttttgacctcagaagaaagaaaaagggcaatttgattactattgtccagcacatgactgacccttataagaggctttagggaaattaaatgaaagcaggagaaattcaggtggccatttccagagggagatcaggcaagcaaagcgggaagtgatcagccagggaattagaggacctgggtggacccagcttgtcactatcatgtggggacacctgagataagcatcttaccctcttgggcctcagtttcttcatctttaagataagaagactgtagcaaatgactatgaagattcctccagctcatgatgatcttttaattaaaaataaatggaaaaaaaagacctctcttaactgaggttagtaaaagtatcaagcaggtttctgaggacactccattttaaattaccttattattgggcaaatgtctaacccactggtttcttgtaagtccttccaacattctggccctggcctgctttgtcccatcccaagttgcagtctcatcactctgtccctcaccactgtgataaacacaatagttaccaatccatggtctgctggaggaaacaacgcttttgaaaaatgaattaaaaatccctgtgagggcgcaagagtgtgctataaaaaggtcattaataactcaacttagggctcagattcccattggaactatcaaccacaaaataatctgcttcctggctgagtaaggtaagggctccaagaggagcacaaagcctttgaagctgaaatgttaagagtcagaggaagaaaactaacgtgatgtgctgggctagtttccttgaaatagatttaagctttacagtgccgctgggagatgggcatttattatatctaccactataagcaagcaatcaaaattcagagaagtcaagacggctgcccaaggccacatgggtagattgtggagtcactctttcaacaagtatctcctgagtgccggctctgtcctagacactagggatacagtaggggaagccaacatggtaactgtgctggcagagttcactttctagtgggaggagtgaacagctgtaaaagcaccagttaataggaaagaaatatttgatagtgtgaaatatgacaaaaattaaatcaaggaataggacagagagtgactgaggggttacttctatgtggccaaggaaaaaagaactctctgaggaaggggcatttaaaccaagaacagaacgacaagaaaggcacagtcatacaaagatccaggcaagagtcggctgaggtgggcaggaggaaagaagacagtcctagagtggagacagccaacttcaaacagagcgtggcccacgggggcagccatgaacaggcagggcagctggggagctggtggccaccaaatgagctcctttctctgccaggctgttgaggcgggctgactggtttcatgtctgtctttcaatagaatgaatgggagggaaatagaaaccatgtccacatgacattagtacctgcatctaggaaggaggacttagtcccaggaaggctggccctcccatctggccaccctgagaggtttcagttcccttctggttcatgtgccaagcttacctgtcagctttcacctcccaagggatgcagcgtcagtgtgttgaagctgcagcatatgaaccaataaagctacctctgagtaacatggaagcaaggtaggaaggcaaaaaccacatcccactgtgatatcatcagccatatttcttccacatggcaagttttattttgtttaatttaacaataaagtcattatattaactcgattcaatagaagcagcagggggatttctcctaatttaatcgtgggctttggggcgtcttgctcagtgttaaaacaataccatataaaaatattaaagggattgtattatattgaaaaaaatatgttagcgtctccaaatgcagcctacctttaatttagaaactagtcagcctactttttactttatccgaagtgtcatctagtcaagagggccaatctctgcaagcaaatcatgccgctttagggtttaaactccgcaaagtgagcatttcatccatggaggtgatgctccaatttgaagagttattagatacacccagccagggaatataaataacttgagcttaccagtgtcacagaactggttttctgtaagtcacttgaaaatacaaggacatagggccgggcatggtggctcacgcctgtaatcccagcactttgggaagaagaggcgggcagattacgaggtcaggagttcgagaccatcttgcctaacacagtgaaaccccgtctctactaaaaatacaaaaaaaaaaaaaaaaaaattagccaggtgtggtggcgggcgcctgtagtcccagctactcgggaggctgaggcaggagaatggtgtgaacctgggaggcggaagttgcagtgagccgagatggtgccactgcactccagacagaatgagactcagtctcaaaaaaaaaaaaaggaaaaaaaagaaaagaaaatacaaagacataaccaacattctgtatcaatctatgtatccattatataggctatatagtatgcagtttaaaacgaaaagtagttcctaacaattaaccgttataagaaataatctccaagccttttagaagtcttgaaggactgaagagactatgtaatctgctgatttagtgatttgaaatctggggattccaaattcacacacacatatacacacacacaatggctagagaccaaacaatgttttttgttctcagctggcaaaatgaattaacaaattcattaattaggatgctgtttatgcttgtactgaatatatatgaatgcaggcccactcaaggattccagctgggagatgccaacttttgaaattcaaagacaaactagatttatctttggtgccttcataagcttattgtagtcacactgaccatgtgggtttgtgtgtctaagtgaggcctgtgaatatttatttaaccaagcaagttttaaagtctatttcatgtcctttcaactacaaaatgcaaaacaaaaagctagccatgggtggtgggaagacagaagaaattatctttatacaggactgcttttagaagaagaaagaagtggctgaaatctggggaaaggtacagataatagctgtgattcactccagccgtagctaacaaggccttgtgcttttcctggtgggaagcagatgggaaggatctggaacagggagaacgagtagggaaaggaataagccttggatacaccgctgtttccctgtctctctctcacatggtctttctctctctccctctctatgagaaatcttttttcatggcccaaaaaaaaaaatgtttgaggaacaaaacaagatcccattgtggagggactaaagacacgccacagggagcttctgtcacacggttcagatcccagagtgaaggggagtcagacaagaggaggtttcaactcttgaaatctttgtcatgcatttgctttctttattgacagtacttacttcttgtcatggaaaagtgtaatttgccaaaaagggggcagtggggagaggggaggagtagaaagaaatggggagagagaggagagagaagagagagggagagagaaagagagagagacagactaatacgtacaatacaaataatacagcaagaggaagcatcctattatagaattctttatgcttaaaatggagtctgaatgttttttttttttttcatctaaaaataagcctgcgaccttttgcatttttcaggccataagtatttctgcaaggtccagagtcccaaggcacatgggggcagagtgagggctgtctggtccaggtccccggagctaagaagtatacctgtcagagaagcagcagccaggttgaaagagaagaaatccacagaggcctgggagggtactctgaacccccacttcctctgtcagttattgattaaacctcttacacatacacacccgttctagggaagctgaactttaattttatgcctcctgcagaaaacagagatggatacagacatgggtccgggagtaaataacactcagcaacataagaagaacacacacctgcaaacgttgccacggttagattttttaaagtgtaaagaaatgaaaaaaaatgtcgaacctcacttataatcaaagctatgcaaactaaaatgtgttacactttttaaaacttatccaattagcaaagatgaaaaagaaagataataccaatgttgatgaaggtttatgcagacaggcactcttatgtctattcaaagttggaatagaaatgagtagtctttctggagttaaattaggcaacatgttgcagatgccttaaatgtgcagattctagtgcagcaattccacttttagcagcgtattgtatcagacatatgcagtaggatgttcatcacagcattgtttagcaaattgatggaaacaatctgagggttcaacaataggatgattggttaagtcaattgtgttacattcatacaacagatgtgattaaaagttatgcttggccaggcatggtggctcatgtctgtaatctcagcactttgggaggccgaggcaggctgatcatttgaggtcaggagttcgagatcagcctggccaacatggtgaaacaccacctttactaaaaatacaaaaaatagccagtcgtggtggcaggcgcctgtaataccagctactcaggaggctgaggcaggagaattgcttgaacctggaaagtggaggctgcggtgagctgagaccgtgccactgtactccagcctgggcaacagagcgagactctgtctcaaaaaataaaaacaaaagttatgcttacaacaaatacataactaatgaaatgctgaggaaatgttgctaacctaaaaatgaaatctgaaagctttctctctctctctttctctataatatgtatatatacatacacacacatatatgtattatccatatccatacaatgcttatgttctaagcgtatagctaaatgtacttgcattacttaacactcacaacaacacaataaagtatacactattattgtggccttttcacaaatgaagaaactggaaaatgagagaatgaaaacctaaactcaggtgtagtccagtctaaactatataaacttcctctcttggccatgagtaggagtgtgcgtatgtctgtgtatgtgtgtacatgtgccttcctcatgaatacagatactctgaaatgttcatagtcacctcttagtggtaggcttagagccatatatatatattttttgtttgtttgttttgttttgttttgttttgttttttttgagaaggagtctcgctctgtcaccaggctggagtgcagtggcgcgatcttggctcactgcaacctccacctcctgggttcaagcggttctcctgcctcagcttcccgagtagctgggattacaggcaggcgccaccatgcccagctaatttttgtatttttagtagagacgggatttcacagtgttggccaggatggtctcaatctcttgacttcgtgatctgcccacctcagcctcccaaagtgctgggattacaggcatgagccaccgtgcccggccgtaatattttttttttattgttttgtgctgtgtgtttcatgatttctacagtgaccatgtatttcttttgcaactaagaaaaaactgcaattagcttctcttttgagatgttattctgattatgattatcttctgactcgttggaactcagaaggtgtcaagaagagggagaaagtaactaacagataattttcccctgggtgtactctgaagcccaggaacagccactgggaaaagtctgcccatgtgccctgggaaaggtcacttgactccatgaagtgacaaataaaagtgataatgcatgtgttaataaaaacacctgctgcacacaatccatgctgttgctccttcctctgccagcctctgaaagacaccaattccagcagtggtattctccagactccccatcagacacagttggaattttctcaggaaagaccatgaacttacaatcaaagggaaatacattctgcctgaagaatgcattatcagtgctcactagatgcaactgactgtccctactctcgtaagttctaactccctttgaattattgtccttggtttttggagcttatttctatctctattacaggggttttcaaactagaaaatgtatcctcttgaagtgtcacaaaaatccttcctagaattatatggacatagataattctaaggaaattaaattccagaatctcaatttcccggagtctttcctaaatgtgtctgataatgcatttgtggttaagaggtcatgccagtttactcatctctccatttacaagcttgcttctcttaccttcaagcagaaagacataattttcacctatggcaaatctattataactgcctgtccagggctatgaacaccattggagttcttgccccagaaaggaccaatttgatataggggttaaaagtaagccttctataaccaagacattataaatccaaggtaggtggttggttgttttgggtgtataattcagaggttcaaaatggaaatgaccttgctctaatgaaactctgttcccatcacataattgataggcaatgtttctcaccatttatatgatacggactaaaacaaggaatggaattgatattgaacccttggcaaaaataacattcatccataggtaaaaaaactaattggaaataaagaaccatccatctcattaagaaatatatttctaatagacattaacttctatatttaataattgtttattgaaatgttcaatacgtttgtgttgttttgatcaaatttgttctaaaaatcactgtaatgataaatcaatctagaagatttaaaaaattacctatacctttacggtcataggatttaaaaaatttatttacacatatttttattacaaaggattatgacagcatgatcaatgaaagatttttaagcataaaaatatataacattaggctaatgttatataggctaatattatatattttatataacattagcctaatgttatatattatatataacattaggctgttatatatttaacattaggctgttacatatataaaaaatattacatatttatatatataacattagcctaatgttatataaaatatataacattaggataaaattaggataatagaaattatcctaatagaaaattaggataaaagaaaaaagatgtagaagttttgggtatcaaaaaagagcttgttcgtgtatttctttaaaaaatgaatgacagcaaacatttacaccaaaatagtatttagatttcactagatacatttcaaaagtgacaagttttatttttaaatgtaaatatttataaaatgccagaaattaaatcctctgctattgaactatttaaacttatgataaaaaaaatttaaatgtcaaattttggataaacatgtggaggtataaagaatttcaaaattctctctctctctgtgtgtgtgtgtgtgtgtgtgtgtgtgtgtgtgtgtgtgtagtaaatgaacgacaaaaaatgaaacccactgtctaatgcatctcatgactattctttttcctccatgggacccaagaatttactttattgggtttaagggggctaatgaaaatatttgatttagctctctaaagagatctggccatattccagctgcacccacaagccaggtatatcagctgggtctctcgagcaggtgatcaagaacgcatgaacaggaatgagcacaggtcagccctgaggaagagggtcatgtctgatactgggctgttccctgaggggtggaatcaatttgactcacagaaggaaaggaaaactaaactttccacctgtgacttataactacaatcaggtcatttatgctatcatttccaagaatggaagaaatcctatggaaaaaaatgcgcatgtagatggaattcttttcctttgtacacatttgacttacccctttttaatgccttttacttgattccattagaaaaaaaaatccacaactgagtacactatgctttagaaaagctgcatacatatacccactctcaaacaatgaaaatgacttggaaattaatgatgttgatgtagaaaaattgcaggaacaggcatactgcttttcttcctctctgctgactctgaccaagggcaactccaaggatagaaagttatccatttgatgaaattagaaagacacggggcatagaaagggtcaggtccagccacttaccacctctgataggataaacatcctatcagagtctcggtttccttatctttaaggtggactttaaaacagacaccttgcctactgcttcacaagactgctgtgagtagcaaatacaaatgcgaatctgaaagaatgtcatatgccattagtgattcatcactttgagtattaacagctcttcaatgccatcgctgttagaagaagaaacttggtgttctccatccccttcttggtcctgatgctgcctttctttccctataaaagtagcccattccgggggagggatgggtaggaaagttgccatggattttattaagatagagtaaaaatttattataggaaggatgcacatttcaacaaaagcttagggcttgcagccctcgtttcactctaatgaaagaaactgccacaactctgggcatagtcctatgcttaaacaactgtgtttagcttggtggaaatacaccaagatgaaagatgtccaccttgattcatccgtacgatacaggaaagaaaatctggcaaattagaaagacatggggcatagactgtctatttatacctataaggtcaagactaatctttaattttaattcagatagatcgtcttaatgaagctgttaacaacagtgagaaatggaaacatctgatttgtcttgactacgcttagacctcacaaatcttgaactacaatccacagaatcaagatcacttaacacttacttaaactgatttctgtaagtaatgtcaaagctctatcctgaggtaaaatattattagtcctgacatgattaacctgggcaattgacacataaaaaggatcttaatccattaatttgctaattggtgttcattactttggacatgggcttcgacatgtcagcctagtgttcatctgtaggaaataaagacccaaacagggtatgcaactgtgcagatctgactgcagcttggaaaaaaaattggagtcttcaaattctctgaacatgaaaatgaaaaacacaactaataaacagttgtgttgccttttcttctttgcccccaactgtactgcttcatttttaacatatgtttaactgctattttttattaaactcatatttaggcagggaggaacaagcttaccacatatgctttgggttatatgctaactattccttgtcagatggtgagttaaaaagaaagacactggaagagtagaattaaatgtaaatctgccttatgaaaatccctagcttttgagaggaaacacttctatttgagagaatttgggacaggtaatttttcagggccccctgggacttgaatctaatactatcatacagaggttctgtttcaggtagagtcatcttgagtcccatctgagatgtccctgaagtgctaaaaatcatccctttaagaatccatatctaagacggtccatatcctagaccctattcttggcttataaagttgtagtgaaaattagtgaccttggtcatattaggacttagttgcaagtactctctatcgaagaaacaaaaggctgagagatcgatcacctggtctggccaattgtatgaatgcacaggcatacaatccaaacatcccaggggtgtggagcttccattcaccagaactgaccaggaaggggagtgttcactagcagattatagaaaacatgattttaatgtgccctctcttcaatatttactgtgatcccttgtgcctcagttttcctacctctgaaatggaaataaaaacatcaatgaagtcatattaggacttagttgcaagggggtgctgtgttatgcccagtggacaataagaacattgcatgactttagaacctggagatgaggactgttggctgggagtactcaaataaatttactccctcaggttcttccctcctatttctacttacatcaatgagcctggttccttggttctgttctgctgttattccaaaactctcagattccatgcatatatattgattaagccaagcacatttcaactacatcatgtcacctaaacatcgtgtaaggcttatatgattattacttcatgatataaaaagattctgatgaagtcaagtgcgaaggcaaaggtcatttaagcaaaggcagaggtaggaactgaacccatatcttctgattccaaatccagctttcctcccacccccctcattcaactgcacacacttctggcttcttgtcatttccttcctctctccattttgtatttctttccttttcctccaccatctgcatcttctgcattctcttccttgatccattctctcatgagatccattatctcatcactcaatctgtttctcttctatagaactgctattaaagttcctgaattctaagacaattttcttagaaggatagaaatgtgggaaggaactctaataatgatatcctaaaactaatgatgttaggactaataaaatgacaaaagttttgcttttgttgtttgattttaaatgtataaatctcactttaggtatctgtgagcatagttggcttgaaaaaacaaaacaaaacaacaacctgtaatccaaagaggaaacacagtgccgtttcctttgattttctcaagggagatattggcaaaatactctcatggaaagcgtatctgcaaaagctttcctacgcattaaaaaaaaaaggaacataaaaagtattagctatttgacactcataaagcagactgaattactctaggcattgctgggtacctggcatttactacagtcacttgagctattttgatttatgagggtttagccctcaagcaggttaggtttaactaaacttgctaccaagtgcccacttaaggattctttcagcaaacaagaagaaatattcttcacttagagttcatgccaccaagcctcaagcttcactagtaatgaggcactcatttccagagagcttgcgctctgttttctccacagcttccctcaatttacatctctatcaaagaaacaaagagctgagagatcacctggtctggccaattgcatgaaatgcatgggcatgcaatacaaacatcccagggctgtggagcttccgttcaccaaaactgaccaggaaggggggtgttcactagcagattatagaaaacatgattttgatgtgccctctctccaatatttactgtgaggctctgtgcctcagttttcctacctctgaaatggaaataaaaacatcacctatctcataagattgtttggaggattaaatgaattaattcaagcatagcatgtaaaacatgtgctagaagatgatattaagtatgcagtaaatttagctaatactatcaacgctttcccaatttgttcctatagggcacccaaattggtacagtaatctttgctgacaaccttcctccccatcacaagtctcacaaacactaacttgttcctcttgccttattctctctcaatcctaccctttgctagtcaaaattaagttctaacaagacaactggacagatgaatttgtaagccacctaaggtattttctctcccagggaaaggaaaactataattcaaacaaaattcatgtctcagaaagattcttaagcaatcactttaataatagacttgtaggttagcagataaatgtttttttgatcaaatatcctttctcaagtgcctggcaaacattgtttcactaaaccaagttatcacttttttttttgagacaaggtctcattctgtcaccgaggctagagtacagtggtgtgatctcagcttactgcagcccagacctccagggctcaagcaatccttccacctcagcctcctgagtatctgggattacaggcacacaccaccacacctgtctaatttttgtaatttttgtagagatggagtttcaccatgttgcccaggctggtcttgaactcctcagctcaagtgatccgcctgccttggcctcccaaaatgctgggattataggtgtgagccaccgcgctcccagcctcatctaacttcttgattcatctgctcccaattttaattacaatcacaggcaaatggtatcttgggatgacaaacttccctgaaatctttctgggtacatgtcttcaatttacttcatggagcaccaaactataaccacagaaagtgaattctcgttccagacacattgtttattcattcagttgcataggataagtcactttacttttctgagcctcaattttctcatctgaataatggaaacgataatatgtattcacataaccacagcttgagaaccaaatccagctcgtcacatcttcttgtaaatagagttttattggatcacagtcatgcccatttgtttatgaactgcctctggctgcttttgttgcggagttgtgacagagaccgcatggcccataaagccaaacatatttaactatctagccctttacagaaaagtttgctgacttctgctccggatgactgctgtgagaaaccagtaagacaactgacagggaagtgctttgttacctgcaaatactgatgtaaaatgtgaatctttattattgccttttagatgtctacaggattagtgtgtcgctcaccctgtagctgcattcttcctagctaagcaatcccaaacaccttgagcctgttacctattaggccaatttaaaaaatttctcttgttgcctttgttgttgggtggggtatttttggacttgctccagtttctcctattcatttttcttttaaattttaattaatgtatagtatactggaaaggttattatctggttctcaagtaaagtctcagttactatagccaagaactgggttggctttttttttttttttttttttttggagggtgtctcgctcggttgcccaggctggagtgcagtggcgcaatttcggctcactgcaagctctgcctcccgggttcacgccattatcctgcctcagcctcccgagtagctgcgtctacaggcgcccgccaccacgccaggctaattttttgtatttttagtagagacagggcttcatcatattagccaggatggtctcgatctcctgacattgtgatctgcccgcctcggcctcccaaagtgctgggatcacaggcgtgagccaccgcacccggccgggttggctttttaaataacagctctgtaatgaagtactcttggtcaagtagatacagcaggatccaaaaccagttaaatcactaactgtgaacatttgagcaaattatttaccctctctcggcctcagcttccacatctataaaatgagagcacaaattatacacagctttgagagttactgttgagattattacagtgtatttgtaagcaagctgacttatgcaaaatgcctggcacatagtaggtccttagacaaggctgcggatgtggcttcctcatgtccttgacagagagacacttttccatcacaatcatgcccagatgattttaaaattgtgagtccgtctattaggcataagtatcctaccttacatttgtccctattgaacttcaacttgcttttgatttattgaggtcactttgacttctattcctgtcttctaaggagttagaatttatgctcttctgaatttgtattctgtgaacctcatttccaaaggatgaaagaataagagaaaatacaggttaactagggtcataaggctagctgtctaaggcaaaattaagtgtagatttgacacaattattcaaaacccaatatgacaaaatgttttggctgtaactatctaagccttaagaaaaaaaatacattttcctatcaatttttcacttcacactgctaacacagacgaagccaaaggggtagaaagacaaatgggtggtcaaaattaacagcatgcttagggaacaaggaatagggaacctgcgactttcctccctggcaagctctccctgatttttaaatgcttctgccttaccaaggtttgttttgagagtgtttttaatctgagatattttatctgctaaaaccttattttttctgctccattttctgcattttcctccagcatctttgattctcagcatttacagcaagcaccggatctctcctatagcccgaagctcgttaaactaccgcaaaataagatataagcacctcattaattaccatcagcaagagaattagtgtgcctatcaataaatattaaagttgcacattctatctctaaagaatgaacttgccatgcacaggtaccggatgccttcccacctgagacagatctcaatcacagaagacaaggaaagccctggcggcagattctattttaatccaaggatttggggagggactttcctgccaactaaggattagttcttttccttagagccttgtgactttgaaaaccagctaaaaatgcatatcaaaatgtaaaatgcctaaatcagcattgtgggaatcatttaaaatatactgacaaagctgctcttataagttgagatattaattcaaaatttttaagtaaaaaaaattaattacattgaaatacacaaaaaaaaatgtttggaagaaaggccttttgctcacctgcaatttctaattttccaataacacaataattatactagttcatatttattgaagttattatgtagaagacgctgtattgagaagcgtaggtgctcatctgttcaccaccacaatgccatgaagtctgtgctattattattttactcaccaaaaatgtggggcttaaagagattgagcaacttgctatagatcacagatctgtttttaaaaatcagctgcatacatgggggaaagaacaccaaacaattctaagaatatgctccaaatgatacaaaattatatacctgtaaaagagcttattgcagtcttaggttgcattaattgaagaagatggtccaggaaaaaggaggtaatgaccttgcccaaatccttggacctcagaattcctccaggggtctgttttcagtatgatgaacacagtttacgtggaatatggataaaccagggggaacgtggccaagacgaccggagggcttgagtcatgatatcggagagatgactgcaggaactagcagtggcagcctggaaacagaagagtatcaggctttgtgagagactgtagacggtgtaaaaacaagaacattagctgggctccagtttcccctttttctctcattagtaccacaatgtagagtgagttatttaacctctctacatctcagtcttctcatctctaagacggtgctaataatggcactctgcttcatacagttcttgagggaatttagatgagataatacaaataaagcactgaccattgcacctggcattcgagaagctcctagcaaatgctagccactaatattatggttgccgtcatcattgcttctgtggttcttaaaatagaatggtgatttccaaaatcactgcagaaaatggtctcccaggataaacaggtggcatgccaacaaagacttcatggttccaaaggtttgggaaataccaacttagagaaagttaagcaagatttgtactctgtgcatgtggctctccaagaagaggtaaagtatataacaattcccagctgtgtttggttaggatcatttttaaagaacactccttggaaggagtgtgttctacgagctttgggtcccatgaccacagacgagtctacatcgtcataagctacgcccatcatctgatgtggatgaagcacaccccagagaatctgcccggaggtttcgcgacccataaggagtaaagaatagctgaatgtggtgaaatggggagacaagtcactgggcaattagaagtgtgaaaatgtgcctcgttggacacagggtatgaggcaagcagagaaaactggtggagtagtccccctggtaaaagcttacttttaaagtaaaatggcccagataaacctgatttcattaagtgagacctggaaataaggttgccccatatatactcagccgaagacgtatgaatgaataaagaaatgaatgaatatttttattccaaagttacccactttcctataaaacatatcataaaagtcacaccattattattattattatcattgattaccattacagttaaaattataaacaacatccaaacgaatatcacctgagcctttcttttccaagttgaatatatcacataaagcaggctcttttgattcctacgtttttatttattggcttaacctccagggctccattggaataagtaacactacatgaaaacaagttccaaatgtgagagattcaacagaacccaggacaggctttgtgtagacatggattttcacatgcttattcaaaatatttgctgtcaacggtacttggtgaaagtgattgttacatacagcatggctaacttttttatgtaaatgaaatgcaaatgtatgcaatgttatctttaatgcagatgtagcagaaagtattaagatatgctgagagcctaattaggtcctacatcaaaaactatacataaacttgactccaatatctcaagaacacaaattgagtctagaaatcccagtttgcaagcttaaaaaaaagatgtacatatatattttaaatcacagttctttttcttttcccttctctaagtctgaacacttgaaaggatgatcttggacagatatttcagcgtgggggagggggtgtggagtgggtgggaaatgaacaagtttctttctaacaaaaaccaggaagcaagaagagaaaatcagccacgagccccccaaaaaggcaaaacaaagctgtcttgtgctttccattttcatatgaaaaatgatgacgtgccacaaagcatatttttgcatttatttccatttctaaccttcctggagacaaacacatgtgcattccttcctaatcgctgttacagtaaaaccttatgaactccaggtccactaattctccatgttgatccttctgacggggtgagcggaagtttacctttatttaaggagtgaaagggttgacaaaacaaataaatatcataaaaagcattgcagcatgcctgctcaacctacatgacataagctcttcttaagcacttagaagcactgttcatatagaaaactattcaactgtcttttctatttactacaatagatcctccaaaagaatgctcctatgtgatactttgttagccccttataatttactatgcatagtagaaaagtgataaaatggaacatcttcgtaattgtccataatccaggctccttactaattctgaggagtcttgccttctgattcctcagcaaagtgtagtaggcttagagtggcaagtaccgggggcctctcctgggctctagctgtgacttgctctgtgtccttggacagctcagtggcttctttcctgctagttttatggggcttttctttccccattcacattctaaaattgctttgggaatcaaaatagaaaaaaaaggatgcagaaacaatcagaaaagtatggaaagtactttataaatgtaaggtgtcactggtctctaaattgtgagggcgtgtgggagcgtatgtgtatgtgtagtgtgtagcgtagtgaaaaactccacatgcacaggcatatatatatttggattcataaatatttacaggtgtatatacatctgcatgcatgtatatacggagcatgcatgtatatactgcatgcatgtatatattgtactgtgctcatatataacatgtgcataggtactcatggataagtacagatgtatatatgactatactgacctcagagcaatcatacatataacacatatgagtacgtatgtatatgatgatatactcaaatatacacacatatattgacacataacagacacacatcctcataaatggtaaggatgtatatgtctatctctgccaaggcacacattaaatgtgcatatatctgagctaattaacctgtgcaccttgccacagagagtacctgaaatggcccaagacaaaatctagacctacgtatccaggctgaagggcttaaagcaaacagagcttatccagctctattcccctctgagttttcttccatcttatctaatacaccctctgaaaagaaggatcttttttagttctgctaagatccccaaatgctcttaacatctccaaagctctctaatacaaaaggacccagttgctgcaaggcacaagaattgcactggcttcacagcaccacagaacatgcccagcggaatacattacacagcgctccacgcagctcctctgaaattgatattgctggcatcactcgccccaaatttctaacattgtcatgataaccccatttgttctcaggaactgcttcccacattttaaaggaacagaattttccccatgtctgtccttcatcatgccctttctttaaagaaaaaagaaagtcttcccctgggttcttcctccattttgtgtagtaattcctagtgttgtcagtcgatgattatcaagtatataccaaacattatttcctgctaatatacaatctgtgcaattttaaccaggcttgcacctcaaactgaggacagtggaaggttttgtcttcgtgctaaatagtttggttcagaggataatcgttagagatgctcaaaagaggtggggttgttctgggctggaaaagttagtgaagggggggaaacctgtcctgccccactctcaccttttccagcactcccctcaaaagaggaaaccattcagctacttcaagtctctcacatctgtacttatccatgggtaccgtaccttcatgcaccttgcttctcctctgtgccactctcctaatgaccatcttccctcctgatggggttcctgatgtcggcctgaccacctctccaatggctggtcactgacggggcctgcctgcccccagaattcacctccaaagtacagcatgctcctggttcctttgccacttctcaaaaagcttcttctgatttctgctccgacaccaacttcccgtcctctgacctccgctcttctctctctgtatccttcaccaccacccttcagcattaaccactgaaggaatcactaacctctctcagaggctccagattcacatttgcaagtgtctgctggacatcatcacagaacgtccctttgtagagtatcaatgaaaccagctctgaatgctgcatcttccttccaaatcctaatgtggctgccactgtccgaattttgcaagtttgaaacgcttcatatatgtctttctgttcccttctctttaggactccacattaagtcagcatctcagtatcacctccacttagcttcccacctctgtcacttaacattccatcctctctcctactactcaagttcagaccatcccacctgcagcccaggatgaaagcactctctttgccccagaagtagctagcatcttaccatggaaagcatgcacacaatggggaaagaagagccaggattctagttcggaattgctgcttcttcgcaaacagactttgggcagtgactcaatacttttcaggcccaatattcacatctctaaaatgtgaatgaggctcttttcttattgtttattgaagataatgatgtctggctattgttacaacaaccaaggcttcccttctccaatccagatgcttccaaaaccttcaccctcagagagactgatcaaagaatatcaacaaaaggcccttcacatctttattttgaaaagtatcccaggcaatcttggtgcactattagattttgtagtctctgctctaatccatcattgaacttgaagctggaattcccttcctaaagcataactcaaatcacattattcccaaactgacaaaacttcaagggccccgtataatttcctgaggacattttaggcccctcatctatcttttctccttcccaaatggtaacagacctttgtgctgaattaggctatttattgctgcctctcagttatgatgaattcaattgtatcagaaactcaactgacagtggcctaaacaactaagcatttacttttttccacataacgtgaattctgggggcagatggctttgtgctttgcttcactggttgtacaaggtcagggatccgggccacagttggtaactctcttggtcctcccctcaaggtggggagatgacagtagcagctgcggcaagcaccaagttcacacctgtgttccaacgctggggacgggagaggcctgcaaagagaggtcctcctcaacgccccctctctagtctattggccataaatgggtcacatggctacaggggaggctggaaaagtgactgcgatgtttcagcctctatagtgggagactagaaaggcagaggctccgtgaatgactatgagtaaccaattattagaaaaccctaaatacaccgtcagtatcactgcctaaacttagaattgtccttttccaaacctgtgtctgtttaagtgattatagctaacattcagtaagtgcttgctataggccaggcagtgcttcaaatgctttatgagtattagttcttaatatttacaataactctgaggcaagaggattattctagcaatcgtacaagtgaggacattgaggctgatcaaggttcaaacacagggaacctgaccctggatcccacactcctagccacagaacaacactgcctctcaaggaacagcttaagcataaatcttctccatgaagaggatcttgcctgcaatccccggaccagatgcacaattctcttccttaaaatcctctgatgtacttctcctatggtgagggcaatgatataatccaaagtagggcatgtctgagatgcacggaagcactatcaataattacaacaggaaaacacactgtcctatgcaaacagggatgtatgaacatcctacctgcggttctagcctccaggagagtgcttgtgtacacatccaatttcttcttactggtgcactgggattttgagggcgggcactatacatgaatggtatatcacctggatgggcttcatatggtgctctgctcagaataagtgcccttggtcaaatagctatgtgctgacccaagggagccttgaaaggctgacaggatgtacttacacaagggactacagggtggcatctgtaaagagtgggaaaggtgaaggctctaaatcagattttgcctgaattcaaatgctaggtcaaccatttgcaggctctatgatttgggacattttacttcacgactatgttgactgagttctcctgtctataaaatcatgataacaaaataaatttccctacagggtgtttgggaccactgagtgagctaattgcatgtaaaatgcttgacaaagaaagacttcaaatttaggcagctattaattaatacaaacatgttcattaatttgtgggaaaaaatgtatatgagtagaacggggcacggcaattgtgtcacatgctaaggtaccgcaggaagataagtttggattgtgtgtgtggctgctgggcttgaccttataggcaccatctttttcccaatgcttttaagaacagagctcaaagttcagagtgccatctttgttttcatgccagtattttcaatggtgcacacacagacacacattctgttgatgcaaaatctgctatggactgggatggggtcatattcagagccccgccgtgataaataagactcctttctgtacttttgtgctttcttatttcaaaagtgggtaaaaatgtgaccccctagacacattgtggcaaagagtgtacagatttaagtaaaatggttaactgagagttaactggttaattctattctaaaacacgtttgtggttttgctgtctggaggtagaagaaaatggtaggttgaacataaatgcaggtttgcatcttgtctttggctcctcaggtaagagatgcagggaggcagcagtatccctagtggtaatcaatgtttaagaactgacaggccgggcacggtggcccacacctgcaatcccagcaatttgagaggccaaggtgggcagatcacttgcggtcaagagttcatgaccagcctggccaacaaggtgaaaccccgtctctactaaaaatacaaaaaaaattagctgggcgtggtggcgggcacctgtaatcccagctactcgggaggctgaggcaggagaatcgcttgaacccaggaggcagaggttgcagtgagctaagatcctgccactgcactccagcctgggcaacagagtgagactctgcctcaaaaaaaaaaaaaaaaaaaaaaaactgacaaaacttgtattagtccattttcacactcctgataaagacatacctgagactggggaaaaaaagaggtttaattggacttacagttccacatggctgggaggcctcagaatcatggcaggaggcaaaagacacttcttacacagtgagagtaagagaaaaatgaggaagatgccaaagcagaaagtcctgataaacccatcagatctcatgagacttattcactaccatggcaatggtatgggggaaaccacccccatgattcaaattatttcctactgggtccctcccacaacacgtgagaattatgggagtacagttccagatgagatttgggtagggacacagagccaaactataccactcagcttttgcagggttatggaaaggtgggacaatctcaagatcagttagaaacctttaagacagcaaacctgttgctggtgttgctgcagtgttccaggtaacagctttggatatttttgtctaagcatatttgggtttcctctcatgtgagtggacactgaaacaaatgaactagctatgaaagatgcacctttattcattgtaatctcaatcccaacttcttccttttcatcatttcacatgggatgagagaccttatcacactgtcttcatcagtagataactcccactaactcaagaataagcagaagtatccaatttgtatacactgatatataaaaccatggtattctcctacttactttgatcaaccccaatttggcatgtccagttactgccctggggacccattaagagtctatggaaacaaaaaatgcatgaacgagtgttgggagttgattacaagtccaaccctctataaaggccacggcatacttctgtttatttaatatgcacaacaccaagagagagaggtagtaattcagtctgctgggtttctccacaaaatctaccctaaggacaccagcataacaggggaacaagtcaaactggggtggaaatcagttggtatttaaaaaaattatacaagtagcattcatcctaggaaaaagcagaactttcttggatctcttttttttttttttttttttttttgagacagaatcttgctctggtgccaagtgcccacgctggagtgcagtggttcagtcatagttcggtgaggctttcacctcctacactcaggtgatcctctcacctcagtctcccaagtagctgggactgcaggtgcaagctaccatgcccggtaatgtttttttttttttttgagatggagtctccctctgtcacccaggctggagggggcagtggcatgatcttggttcattgtaacctccacctcctgagttcaagtgattctcctgcctcagcctcccgagtagctgggaccacaggcatgcaccaccacgcccagctaatttttgtattttttgtggagacagggtttcaccgtgttggtcaggctggtcttgaactcctgacatcacatgacctgcccacctcagcctccaaagtgctgggattacaggcatgagccactgcacctggtcctggctacattttgtattttttatagagatgggagtctcccaatgttgcccaggctggtcctgagctcttgagctcaagcaatctgcctgcctcagcctcccaaagtgctgggattaaaggtgtgagccaccgcacccagctggaaatttgttagacccctttccgcacttgatgttagacaacagacctataagcaattttatatcttctggcttactttttgtttgttttgctttggtttttgtatttcatggttgggagcaaggcaaaagtgccccaaggttttcggtgtttaagatctccgaagttttaggcccagatcacatatctaatgaatcaaacagacaggacgcaaacccatgcctccgtgacccaaagccccttcatgtataaaatgatgagccagggtcaagctccaggatgcccctgaaagttctagccattcttatggcatagcactgtacactgggacatgacttaatttctccacaggcttctcaaatcctaaaacacgtctctgtccacgcctgaggctcggtatcacaaagccttgtgaaaacgcctctcctgagagaactttcagcccccagacagccgctcattcccttcaagggctgtggtcccaggtcccgggccctagctgtgcttcagtgacatgattcaggagaacctcctccaaagcagcagggcaaaccctgttattttctgggagctgttgtccttgagtcattacctcacactcttagaacttcttccagtttctagagatgaaaatgcgactcagacagtctttgtgactaaggatagaagagaatataagggtgaacacaggacaccttgtggactgaggacataagttcgtaaaagctccctgggctgatgattttaatacaaaagagccaccagacacggttctgagtttaaaagtagaagaaatctggtccagtgtaaatcaagcttattaacgtaaagaattagtgcagaaaaattaaatgagtggatgaagaaaaaagtttggaaggaaaaaataatcctcctcactaccttttaccaaatgagcgttggcaacatgggttggagttgcctttatgcacataatttgccatgcctacattctttcagggcctacaataatgttcctagccatgtatttgaattaaccaggcccagaggataaaactttcaaattaaacacattcctaaaggatttcaggctcattgtgtatgcaccaaggaaacataacatcctaaaaataatacgtacacagagagaagcacattttccatgaacattaaagtggaatatgaattatgacccagctcatgggaatagacatctgattacatgcaaaatggagcttttgtaaataacatcagtcttcgtgagctaccacaattattatcaaccatttaattttattccctagcaactcatccatcgttgttaaaactgtccacttttgttttttaccttctgatgcatgaggctccgaattttataaagttcaccgttaaagctatgtagattaccagcccaacagcgaacgagttcacgaaattattagattcaccaaagcatatgctgcattgtatatctgctattttgggatgtattttgctggtgaattgctagaagcagcaaaattacaacggtagccattctgttcactttttatacaaaggaatcatgaaaatgtgtttaaactttcggtatttgggtatttaagtgcaaagtgactctcaagaaaatcaagtatacttctttctgtctccctggcctgcaatctttgacactattttatgaaataccatccataattccagttggtctatgtcatatataatacgcctgcctcataagtagtaaaataagccactttgtgccttcaccaattctatttcacaacaaagtcaagagacatgtttattaatagaactaaacttttattgatagaagtttaaacaggaatagatgaaggatgctgccaaatgcatcctttgcctgttcctattttaaactcaaaaaccagacacaagaagtacctatggctaatcttttgttctgggagaagttgctaggtggcacctctgaacaatgcctttaacaccttatgggagacctgacctcataaaatacgttgtattttctttcccttgaaattccatttcagtcagaggtgaggattttcattggcttccagaaacctttgagttttaactgcatcaggagtaagcttagaaagcctcctggcctgcaaaaaaaaaaaaagctgttgaatttcaccatgcagcttcaacagcatttatcattgtaactgagctgtatttggttgaattataaaagcctgtttgtttatgtctcttctaatggaatatgagcccagtgtgggcgagggtccattactatcatattcatttgcatgcgccaatagtattagttgaattgatattcactgaaatgaagagaggactatttaaggtgcgaatgcaagtttatatttctagtaaacattttaacattttagtcccaatttcattttagtcttggcctgaaaacgtattaactgggagggctagccatacctttctattggagccattcatttgcccattaacacagaagaagtagaagaaatgaaagggcagaggtggcttattctgtttttagcatctactttgtgtcagactttggctcggcgttttgtttattttgtgtcatttgatccataactatactactgagattgactgaattatccccatctttaaaattaggaaactgggactcagggaaagtaaataacatgctcaactaataaatggtgggatccagatctatccagctcccaagcttgggccacgtcctctgctctgttacaacaagtatgcttttactcaggcatcatctctaactttcttctttaattctctactttaaatcttgcaattaataggagatcctagatctgccaaaatggatagatagtacctaaaactatggtggttaacatgtgatttgaagttagaaaaactatgggataaaggccaaattacattttctctcaaagtctcagtttaccaatctgcaaaatggtaacaggcaatgtctatctcccaaggtggctaggagaaataaatgaccttacaaacctaaagcccatagcactgtgagtacctaacccacagtaagtgttccacgaagggtagctactgccattatagctaaccacttgttcaagcaaaaatatttctaccataaattatttcctaagagaaagtttgctcaaaaatattttttttccccaaatactgacaaaagcttgccctgggaatcccattcctcttcacatctgacagtaacctggattttgacagctctgcttctggctcacaatgtattcacatcaggacctgctctgcttttgcccatcatggttacttctacatttttgcaacttaattccaataaatatataaaataaatgctgaattctattaataaatacacaaacgggtaaaggcatgctgggggcatgaggaggagttgagtggtttatggagggcccttcctatctccagcacaatagagactatgccaaggaaattcatacaaacggtctagataagtagactgccagaaacaatctggttttaatgaactaaattaggattcattcattcaacaagtatctaatgagctcctactatgtgcggggccctttgttaggtgttagaatatcatggtgagtcaaagcagatacagtacctgccccctctagtttacagtctgttagaaaagaccagcattaaattaggccaagaatcaagcaaacaaaagtagaattgcaaccatgacaaatgctagcaaggtgacagacacagtgcagtaaccctatctagcaggatctggcctagtcatgcaggtcaggaaagttcactgaggaagtgatgctgaattcaatatttaaaggctggcccaaatgtctatcaactgatgcgtgggcaaataaaatatagtctgtccatacaatgaaatatattccatcataaaaagaaatgaagtactgattcacgctaaaatgcagaggaaactcaaaaacattatgttaagggaaagatgccacagtattgtatgattctacttacataaattgtccagaacaggagggatggtggtggtgagggtggtggtggctgaagagtgactgctagtgggtatgatggggagtgagtgctagaggatacaggtttctttttggggtgatgaatatattctgaaataagatagtactgatggtctgaagtaagatagtggtgatggttgcacacctctgtgaatatattaaaaacactgaattatacactctagatgggtgaattgtgaggtctgtgaattaaaaaaaaaaacatctaaacaccaacccgaaccagatggtctgtgaattatatcccaataaatctatgtgaaaatactgcaagcctagggaaatgacaagctgaggagcaaagctcctgtgtgtggttggaggacacatgacgagcaccattggaaagacagaaaaaaaaggccagggaggatcaggcctgagatgagactgaggagggaagcaggagcaaatccacacagggccctgccagccatgttgatgttctgtttatcctaaatgcaatgggtggcactggagggctttaagcaggaaagaggtggagggaagaggaaaggacacaatggaatttacattgtgaaaagatcattctggctaaagtaaggagtacagacgggagggagttggaaagcttatgtgtaggccagttgagaggctgcaaaagtccaaggcaaaggtggaggtagcatggatgggccgaagtgaagagattagaaagatgtgtaagatgttaaatcaacaggacagggtgacagactggatctgagggtaaagaaggggaaagaattcttgttttcatgttttataacaagatggatagtggtggcacccatgggagacaggacactgtaagaggcccaagatgtcagagggagacaatgagtctggttttagacatggagatcaaagcctttggtatccaaaaagggccacgaggaagacagtgggtgcaatgattccagagctcactggagaggcctgggcttgagatggggatctgtggctcacctaaagagagacaagtggaggcataagtacgcatgatcctgccccagtgagatgacaggaaggcttgagactgagctctgaggagccctgacacttcatagcctgaaactgcataattggaatctcatcataagacaaacccaaagtgatggtcattccatgaagtaactgacctagagtcatcatctgtgtcaaggttatggaagtcaaggaaacgctaaggaagtgttcacattaaaggaaactaaagagacctgacaactagatgtaataggtgattctgaactagtacctttggctataaaggacctgattgagacaatgggtgaaacttgaacggggtcaaaggatttgaaggttataatgtatcagtgctaatttgctgatattgatggttgtattatgtatatgcaggagaatatccttgtatacagggattacacactaaagtattccaggtattggggcatgaggttggcaacttattctcagatgattgagaagaaaattaagtttatctgtactagtcttgttacttttctgtaagccagtgggcatgacccatgtgagaggtagagtgggttttagaagagaaggaataatccatggtgcacaggtcctgagaaggaagagttgaagcacaggaagtttgagaagaaatttaaaacagttgtcatgttgtgtgagaaaatgagtcaatcagagaattagaagattgccaagcatatttggggcccataacaggatggtgattatgaacaaaacaatgccgtgacttttaagcacattcgagaactgaaaaaaatgtagcatctaaaacagatttttaaggttgcgtgtatatccaacttactaagcaagtttatttctaataaaagataagctatactttatagtatctcttccccattaattttgagaaaaacgcaaatgattgtgaaggatattagaaaaatatagtttaaaactcacaaaactatgaaagtcagtttatgtatatgtatatgtgtgtataaaaaatatgcatatgcacacatacacatgtatatttcattttaattaaaaaacccaggttatttaaaatatcattattcaagtacttcaagaccaaaacagttgacatcagtaactgtttaactgaactaaactgaatttatttacaaattgtcactctcttgacaagatttgagcagtagaaaggggtaagagaaacaacggcataaaaatatcaaatccaaaagtattattagctagctgaaactcaattatgatataaagaaaaattccttttgaataccaaattttgtgaaacaatgggatacttatgaaagtgtaatttatatttattttcttttcagatctctaggtgaaggatgcctttatttcacacgtcttcatctgggatctataatgctcaaaagagattatgcctccagtttatttatttgcattatttcttttctattatataccaagtggtaacactcttggtctggttttcctgagatgcatatttgaaccaggacttgacttagctcagcaagcaactaacttcctgggatattgttgctgaagttttgtactatgtggttgtgtgtatgttctagacatacatgtatgaagtagttaaagttcttcttggcaaattggtggttgggggaggataagggttacaactatatctactgacttttagaggtatgccagatgtactgttcagtggaaaaaaatatgcatggtatgatgctatttccacaccaaaaagagaggaactccctataaatgtgtatccatgcatatgtacatctgtattagcaaagagaaagacgtggaaggataaatctgctattacttgttccacgacgatgggcaaatggagaggatgacagaagaaccacaggaatggttagagactcttcttatgcaaaagactatatatagaagttcatgtgtactatgtaaaactgttcataattttgttttcattatcacttacttctcttctgaagagttggaagatatatgttcctcctacctaatctgccaaggatggtcattttatcgctgattacctgatagggtttgtctcaaaatagtgtctttttgtgtcacaagggaagtacactgtgaaagggacttattgcacgtaagcatgtatgtcaaattcagcacatgctctacccatgaagaacacttcagttaattgactggctagcaaaattacatgcagagtacttgaaattacgtaggattccaaagaaaacccttccaagtagcttacatcacattttaccagttgtggttaccatttgtacagatcccttagaaagctataaaatgtgacccaaatgtaatttaaagccagaagtgttgaactgaagaagaatggtatatctcccccaatacacaaatcaagtagaatcctgcaaatagtgcccttctgggcatgagactgagtcatatgaaatttggctaaactcacaaccttgaaagtgaattagagaagagaaaaaattaaaagttggttttcaaactataagccactaagaggtaaaaatcaagaacttctatatttgatcaacggagtagaccaaaattgcccacttcaccttttcacatgacaatcatatggagtgtaatcacacacccaggttggaccaagggtggatattagaaacattttacattcacaactaaagtcattttgaaaacaatgaaaagaggccaaagttaagtctaacaaatgcttaagagttttctaacacagcccagacatctacctattcctgccctggcttcagcaagaattatcttcatacaagatcataaactaggaaactagttttcatttatgggtcaaagagcagtacaggggatccttctgcataaggccacagcagcaatttggaacaataataaaataaggaatcctttcttattacctatgtctatataaatattacatgcgtatacatttatattatgataatagctataatttattgactgcctactatgtgtcaggcactttgccaggtgctttaaatactttatgatacttactcctcaaacaactctgcgaggtaggcattgcctttcctgttttacagagcggggaacagattcagatctgcaatttgctccaagtcacccagctgttcaaaccaaaggctatcagattataaaagtccacgctctcttggctataccccaaggagtttgtgcatgttgatcactgagcttggaacaaatttaggctccagtctatggctacaaaacaaacaggagaggcaaagcgggtcttccatgaggcaagagctgcctcaggcaatcaggggagagtgctgctgagttttcctttagtccaaatgttccctctgttctcagattgttcagagaggactaattctccccaacaatgcttccagttcagtcctcacttgcaagcaaaactcaagagccccaaatttatagctttattctgaaaaaaaaaacaaaaaccagttttgctctcagtgggacccttcaaatttgttaagacctcctgccattttctttctccaaatccatcaccaaccaagtgagagacagagggtgattcattctttatctccaaattgacctagatagtagctccatataaataagacactcaagcctacagattttattaacttaatagtggttcttattcaagtattatttacttgctatggtgtccaatttggtcgccaccaacccacatggcttttgcacatatgaaatgtggccagtctgaattgagatgtgctgtaaagtgcatacatacaccagattttccagatttagtatgaaaacagggatgtaaaatatcttatcaacaagccaggcatggtggtgcatgcctatagtcccgactacttgggagattgaggtgggaagattccttgagcccagaactttgagaccagctgggcaacatagtgagaccatgtctcaaaaaaaaaaatcttattaactattattttatattggttacatgttgaaaccaaaatattttggatatgttacgttaaataagctgcattatcaaacttaatttcacctatttatttttattcattttaaggtagttactaggaaatttaaaattacatatgccacttccattatagttcaattggacagtcctggtctagaatgaaggcttgccaaagctatttaaagactgttaaagttctgtatcatacacaggctctttttgtttcagtttaatcctagaaggaagaaatgtgttgaaattgcagctatataaaatccttgatggactgaaactaagggggaaaaagaggaagcaggtgggtttgaaagaaggaaaaaaggagtatctagcattttcttttaaaaatgtcattcttgatttatttggtggcacaaagtgattttcttacgtttctcagactgcttgagtcagtctatatagaggctattcctggatcttagttgaaagctgttgcctttctaattgtttaactgatcacttctgaacgacaattacagttcattgttattccctgttaaaaaaccattgacatccatccaaaagttatagcttacaggtcagggaatatttatgtgatatttatagtctgtgaagaaaaccctggggaactgccagtagggaggattatttaccaatttctttttcttcaagtttgaatttatttgagatttatatccaaaagacattttgtaatcctgtgtaactctgatgtgtgactataattgtgcatgttggtcaagttcaaggaaaaaaaaaatcttttttctttttaatagtgggggctgggaaccctggttgattccactaaaaacatcacagaccaaaaaaaaaaaaaaaaaaaaaaatccactcaaggaagtagtgttacatacttgaagaattttctgaagttagccaagaaaaataagctacgatcaaggaggaaaagctggagtttcagttttctggagattgtacttcctggtaacataaaaacaaaagttaaattcagaaaaattcaactatgaagttagcatcacataaaaaacaatggaaaatatttaactatgcgcatatgtttgtacacaaacagaaatagatataaacagaccttaattagcattgtagactttaattatctttgtacagtaattgggaatggttttgttctgatttattccataatgcttactgtgttctgttaacaactcatttttttccccttccagcccataatagaaggcttttactgcatactttattacatctgcttctcatttaatgaccattgttctggtctgtcagagcgagtggctatacaacttcccaaatctgcaagattaagcaaatattttgacaatgtctagtttcttttttcctttttttcaaaacataccagataaaaataaaaagatttttacttacccacacaacgttaggagagtttttaatctaacgacaataaagaactaagcggcagcaaaatgtacttcatgtggcaaaatacatcaagcaattttctgtcccatttcacttaaaaagtcctaagaatctggtctgaatcacacagctggggttaatgggagcactcctggactgcagggaggttgtgggcccctgggcaaaccacgtggagaccttcaagcttctagaatgagacagaggccttctgctcattttggagggccccggcaggtaagctgaatgataggtgtctgaatcactcactatgaaatgtcatttttaaaaatggtcatgctacatacaaaattgcaataccactgatggcataaggaccagggtcataactctccccaaagaaggtggatacaaatacacaaacagaagcatttctaagcaactgggcagagagatacagagaaaagaggatacagcgaaaaatctattaacccataggcattcattaattctacaaatgatctaatggtgggaagcagaaaatacacaaataaaccaacaaaagcatgacatggacataaatgctaagagggaatggtatgtggaagatgctgcagtcagtggaatgagggaaaggggttaagaacagatgagctttcaagagacagtctatgcctttcagagtagtttaggaaaaaagttaccgaaagataactaggaacagaaaacaaggtgacagaaaggaccgcattaaccccagaagcataagcctcttaaaactttctggtggggagcctctccttggaggcagcaaccagggaaaattcccgcaaggaggtcctacgggagcagccagaattctactagaaagacaggaaagacatgacagggatgggtctgtaggagagcatcggcaaagatagcaagaggatgcaatcctctttagaggaagtagaggtttgccttgttgctattagattgcttcacatctccattggtttgcgtttactatagggcggaaagcacaaagcaggatatgtatgtgcttcaggaagcttaagtgcaaggcaatggggttcatttgtgagctactggcaaaccatttgtatttggggtgggcgtcccgtgcagcacgcctctggaacagtcccttcactgttaacaccactgactgggcccttaattggagcaggtctgcgcgttttaataaacatctttgatgagttctctggactgttccattaaacactcattctaccaaaaatgcctggtaattctctctaaaaatgttttcatgttaccgcttccaggtctttctaaagttaggcagtacaaagaaacaaaaatccaaaagacttgactttaatttagaagtctcaaagagagtgttcaccctagagcagagatttctaaagttgtagtattggactcgcttgcctccacccccacccctgcccttctcccaaaacaagaaaacaaagcagcatcaaagcttgaggtacagaacagaataaaacatgttggtgcagatttgctggcctcggtgaaaacaacctgaatcagtaggtcttggggtatcttcacttttaacaaacactacaggggattttgatgcagtcagttcaggaattaaattttgaaacacacttttgtcaggcggcaacagggtagatagcttaagaatggggtaggaagctagactataggaattcaaatcctagctcctctacttcctagctgtgtgaccttaggaaataaacactctgtgcttcagtctccttatcttcaaaatgggataatgggagcaatgtgtaagaattgaaaaatatgtaaagtacttagtactgtgccagacatgtcgtaagtgcatgaaaaatgttagccactattaacagtggattcatcccaaagtgatttcagctaatgagccaaatttgggtagaggaagtacgctgaagcagattccaaccaaaccaatgaatgaatacagctaagcataaaatagaatccttattaggtatcctcccaccatcatttcagtacggtcagcaccagtctataagctgtacagacatcctatacaatatcaatctcctgtagcacaatatatcctaacaatcctcttgggcacagacgcagccacagggcaggagacaaagcaacagaaccagcaagcacgcactctgctgcctcacttcatgggaatcccattcaacaccagtctaggaagagatgaccttggaatgcagatccagttaattcaattcaatgagcatttattgaacccttgtgatgtatcagagattcacctagatgctgaggataatacaaagagcaacaagaaaatcaccctgtcctcaaggaggtcataatctagtgggaaaaagagatacaagtaattgtaaggcaaggtggcctgagatgaatgctataatagaagatggaagaaggccatgcgaacacagagtaagtagtaattaactctgatgggggcagtcaggaaaggctttcctgaagagcagacatagcatgccattgtgagagatcaataaggcaagcctatgaaattgtttaatgactttatcattcatggaaacaacccagaaaaagcctgagggaccatctctgtctctgcattaacatgggtgtgtttaagatttgattaaatgtttgttgtttctgtaacatcgcatttaaaaaaaaaccaagtatgaacattcgtctattattctgatcttcttcaaagagagaaagagtcctagaaatacttttcttttttccaaagcaaaccctctgcattaatagcaaaagaagaatggcaagttatcgaacgtattatgaactagttagccaaagcgcaagtctgggaaggcccacatttgttttatgtagcaatgagacaaaatatgagagtttttttcttcttatatatggttgcctctttctacttgactataatcattaataatttctttggaccagcagaggaaacaggtattgatcacaataaaacattgcatccacaaacacttgctatagcaggttatggtctccatggaaaccctccaatagaaccaatctgaattcaatttcagaagtaatgagaacagataattttacactcaatcaatcactgtcagctgccgttatcagccaatcagtcattatgtcagtcagtcacactctcaacaaacttcttctgtggcatggtcagatgagaatgttttgacatccagaagcaacacgagaaaattggctcatctttcctggcaagatgccaaagacacagcactgcattgtgtttgctaaggcaataaacagtccaatcaaaatacactgtggtagcggaagattctaggcagcaatttcaataattgttatgatactgatggcagagacgtactttcgacccaaaagtcatacagtttaatcctctcatttaaacatgaagaaacagagcaccagagaagttcaagtatctgcccaaagctgcacagctaactggtggaaagcccacgactaaaacatgagcattctccccttccagtgctcatccaggatgccttgctgctgctcttcactgccttcctttttgaggcaagagggtaaagggatatttgaagattaggttctaattctaaacagagagccccaagcctgtgggagactcacgggatatttgtgaggcttgtgctttggagccaactcaaacctcttgctgtttggggttagctcgtccttggccaagtacaacttctggtttctaaggaggaacaaaagattttgaaacactacagggcaaccaaatcactgttacaaaatgacattttcgataagtttagtgcaggactatcaagaacacatggactgaattccctaaaaatgcttgggagagggaggtaaaatttgaggggaaaaatctggcaaaatacagttgggctcttgtcaacctcaaatgttagaaatgttggcatttgggaattgtgaagaatctgaaaggtgtctggtttctttcttttttctttttactgcattattgctttgtccatttctcagagacagttctctgaggctgaggttcacattcttccttggtaaaacagatggttgggaggccgaggcaggcagatcacgaggtcatgagttcgaggcaggcagatcacgaggtcaggagttcgagaccagcctgaccaacatggtgaaacctgtctctactaagaaaatacaaaaattagctgggtgtggtggtgcacacctgtaatcccagctactcaggaagctgaggcaggcgaatcacttgaacctgggaggtggacgttacagtgagccaagattgcaccactgtactccagcctgggcgacagagtgagactctgtctcaaaaaaaaaaaaaaaaaaatagatggaccagcttgatagtttgcaaacttcaatgtgcatgggaacttaccaaatctgttaaaaatgcaaatccccagatcccacctccagacattttcattcagcaggtgaggctgggcccaggaatctgcctttttaacaaaggacccaggtaattctgatgcactttctttgccaatcagtgttagaaaacattggttaactaatgctatttggtaaagaatttgggccattttgttgatggtagttttccaattacattcctccccaaacattccaacttcgtaaattgtgtgtatcacccatattacaagaacataattctaatggctatgatcacaagctttgatatatatatatatatatatatatatatatatatatatatatatatatataaaatatatgaaatatacattatagtgccactttctattagctgtaagtaggctttatcttaaataggtaggtggtatatgggacactaatacatcccatcagaatttgtctaaggcaaatgaggtgaaaaagcaaagcaagaatatgggttcaggcttgagctaaaactagtaattgcaaaaagaacagtttggaagctttcacatgaaatgcttgcttcatttctctagtctgcttgcctgacctcagctcacgatacctattttatcttctcgcaaaacattgatataaagctttttgcctgtttctacatgtaatactgatcttttccctccatttccttccgggctttatttttttttctttttctgatgcatttcaggacatttgatgagtcttggagtgtgtttaaatgatgacaagcatgtgatgtgtacactaggtagaccgtacaccctatgaggacaaatacagttctttttttgccatttcatcccctgaacgtgtcacagtacctggcacaaagcacttaaaaatattcatcgaataaataaaatgaatgaaaggatggatggatggattacagacaagtaaaaactcatccatctggaggctgaatgaatgcagatacttcaaaagatctatactttatagtcataatcaataatcactcattttttcaaaggttgtttttattgataaaactcttggttaggtgttgttgaccccacagaaaccaaaagcaactatagtattttgtaattatgccttcctttgtaaaaccagctatcatatagatttttctttgccaggcttatttcattgttgttttgactgaaatggaaatattactggaagctaaaataactcatagacattgggtgaaccataggggagacagtcaggaatggggagatggaaaaaaaacccaaaactcaccagtgcaatcagcaacagatcctccagaagcctgtaaaaattaagacaacttttaaaactctctttgcctgtcatcactacacacatcccaggctcacagtctttctgcatcatgcagatgacagaggtaacccttaggaagcttaacttatctcactggtaggtttcacagcctcatgccagtgacgtcacagaaaacaactttaaatcttccatgaaacaagcaaactggaggagagatgaattcaatgagctatcagaggtgctttccatcctattagaaaaaaggaggaaagcaggaaggaaggcagtaagaaaaggaggagaaattaacatttgtcgagcatccattgacaaccaggcgccacactaaactcttcatattttatctcatttgaagcttattatatttccagggggtggaaattcattggttcattttattttattcatttatttactttatttattttagagacagctctcactttgtcatccaggctggagtgcactggcacaatcatagctcactgcagcctcgaactcctgggcttaagggatcttcctgcctcacattcccaaagtgctggaattacaggcgcgagccaccatgcccagctagtatgttcattttatagatgagggaaatagggctcagagaggttcatccccatgccccaacagctaatgaacaataaagctgggactaaagtaatagcaaatatttactaaggacttaacgtcagtcagtttcatgtgtgttaactattaattcattgaatcctccttttaatcttatgaggtaggtacctctatgcccttttcagaggtcacagaacaaacacagagaggttaaataacttgcccaaggagtcacagctgatacatagcagagctggggctggaacctgcgtgatcagcatcagaccctcgtctcttaactaccacactcagccattctctacaatagcgtctaggttggcctttttccaaaggctaaatcctttccggaatacaactttgattttatgtttctagagaaaacaaaaaaggcatacctcaacaatagcctattagacttttccaagcatgacaaatcatgtgtatttgttatatatacagataggctatgtggtcttaattaaggtgaccatataatttattgtccaaaccatgaaagaaggtgctatcaataattatccagggacaacagtggtaacctggaactgttccaagatggcaagggtgcctggtcaccctagtcctaatgaataaatacacacacacacacatacacacaaacacacaaacacacaattagatatcgttactttcagacacattctgatactacccgctggagtacggatgtgtagttaaatgctttctaacactgtgtgagcccaccctcctcccacctcaagagctgctagccctttctttacctaatgcatttcttttaacttgttttctcacaaaagactgtacgtaattggtcagccatgagagattaatttgtgcttagctggctgagcggacacaagataactcaatagcggatgatgccagtgcatgaaccagcagcttctctcgataagccttcctacctactcgggacctcgtccctccatagcctgcttctttgggaattgccagccaagtcctttactttatttacctcatttttgcctgcctggagaaattcaaacttgcagtttttaagtttcttcatgggccatttttcttacggaaatagaaacagtagcaaagacacccagactctccccttctaaagcaatgcatcaaagagtgcactggggtatgtggatagcagagaaactgagcaagggcaagtttatgcatatccttcatcctgctcacattgtttataactgcagtcagacacagacagcaggctgagagtgatggacatggcgatgacaatggcgatgatggtgatgggaagacttctaagaacttaaaaagcgttttacacagatgatctcatctaatgctatctcagccctaggtggtgggtgcaattatcattcccattttagagatggaaaaacagatatttacagagggcaaacattctgccccacgtccaatctaggtaacttaacctcagagctaacactctaacccacagggcctggacattcaaatgcacaagtcaaccacagatgacagagtacaggacaaattggactggagagatccatgcctcccaactcctcatctcacagatgagaactccagttcagtccttttgcctcctccagaaaatacttacctgtcaagaactttgtaaaaatgaaatgagagaaggttaaaaacataaccaagaagtgctacataaatgttttctactgtcactagaccagcccttaaacgctatttcagaatgtattactctaatagagtaatttttaaatacctggacatcagagctaattggacatcagacattggagctaattccacctaaccatagaaatgcactgtggcctgggtttatgcctgtcatacagttccctcccacggcaggtacatttgccacatcccaatacactgccagtaaagataaagtaccttctaatatacttataaaagcacagagtgcaggggctagggactatagaagaaggcaggaggcaaggaagcaaagggttttatttttttttaatgtccccaactcctctaacctggtccctttgctttgtttggctggtacgacaggtggtgactcttaagcactgtgtagcctgctcttgtgtccagattatcccaagcagtctgaaacttcaagagaatttgcagtaatgcacaagtcaggatttggttcccagagcaaagctgtgctcaaaggattggacatcagaaacaaacctaaaaagagccacaaacacggaccccaggctcctcccaccccctccctaactcacctgtagggtttaaagagattccattttaatgaagcaggatgggcataacacttgggaaggaaaggaaatctggcctaccccaaagcaattagcttcctctgctaggaagagactgtgcttgtgtcctgaggtttttatttcatttttcctcaaggggatgggaagttcgctggtctaagattcatgcctttcagactgctcctcaagtgaggaggccacgtggccctgtaacccaaatgccaggcccttggtatcaccttctgctcctctcagagacaccttgatgtcaccttccgctcctctcagagtcactctgccgagtcgccctgtgatgaggacattatctggacctgtgctaatacagtggctaccagccacctgtggccaccgagcacttgaacctggccagtcccaactgaaatgtgctgtcagtgcaaaatccacacctgagttggaagtgaataaaaatatctcaatttttttacatgaattacacattaaaattgtactattttggatatattgagttaaaaaatgtatctccaaaattaattccacctttttcttttcaattcttaaaaaacatggtcacacaaatatttaacactgtgtctgtgcttatcatatatacgctatatttccactggacagcactgttctagacactcatcaggtatgattgctccatttcccagcagcatgtgtatcaaccaggagcctgctagaaatacagaatctcaggccccatcccagacctactgaatcataatctgcattttcagagatccccaggtaatctgcatgcacattaaagtctgtgaagcactgccctggggtctaaaacattacttggcacacaagaggcacttgagaaatatttgttgaatgaataaatgagttatgtctaggaagctgctgtacttgggggcactcgggaaaatgtgaagggctgtccctggctttctccttagctcagttaatattgatatactcatcagattaatcacctttcattttagtagctgatacggtttggctgtgtctccacccacatctcatcttgaattgtagctcccataattcccacatgtccagggagggaccaggtgggaggtaattgaatcatgggggtgggtctttcccatgctgttctcatgatagtgaataagtctcaccagatctgatggttttctaaaggggagttcccctgcatatgcttgcctgccgccatgtaagatgtgactttgctcctcattcaccttccgccatggttgtgagtcctccccagccatgtggaactgtgagtcaattaaacctctttcctttatacagcactcagtctcgggaatacctgggttataaacagacctccggctgaatgttaagcactttaatgactgagaagctggggagtatggggcagcatctttcaattgctgcgctgaagtaaaaaggctgagacaaggacagaaggtggggaaggtgagtactctgaggcacccaagctgcatagcactgcttgtgctgggatcacaaggtgcccagatcatccaaggggtgtaccaggtatagaggggagaagaagaccctagaacaggtcagacagtgcagagaatgagggcaggccctggccaggagtcagggagaggctgggcctcaaggcatactgcagtgtccagcaaatcaaaaatctgacaagggactggcctacatccctactccccattccattcctttctagacctaaaatctcaacacaaacggaatgtctgatcactttagctataaaaacacataaagccatatttttcccccttaaatcagaagcaaatgctaagggaaaaggacttcgtggcatgcagagaacaacaggcacaactattgtctctgtctcctggcagtctcccccagacatctgcaacccccactgcaacaacctcagaccagaacaagagagggctggaaggtcggtggggagcagagagaaaagaaagcaaggactgagaaatccggggacaggatagatcaacggagaaaaggggaggaagtgagaggaagcagttaggtctcagaagttccaccagaagctacatgtgtgcatgggagagggaaaggagggcaggggaggtagtggagagaaatatgaaggtatgtcttaaataaatttcccttttaattagcatgaggaaaaagaggaatctacgtctggctggagggcactgtacacacaggatggcccttgtgcaaactcaacttccttcaccccattctggcaaaacatggtcagctctttctcagctttgataattgtcctagggaatagtctccgccaggagaggtggtggggagacagccagcaggtttctattagccaataagcctctcacaaaggggaaggtggtcgtgggcacatggaactgagtgtcgcaatcatcctgctgccaccatgctggagcagcttagagatccacctgagtgagccagaggcgagccgcaggaagggtactgcagagatgttcatgcaaatgcagggtgatccccaggtccctataccaagcagcaaggtgcctctgacaaatgttgcttaatattttttaagcaaatcaacaaaccccagctggactgggtggaatattacacagcaggatccaggactgaactgaggaaagggagctagaattgataacagatgccaacaggccttcaacagagagggaaaaaacagccttcaacagagagggaagaaacagcctcctctggtgtcaacctgaagtaaggttcttttgacttcgaggctgctctgatgaaaaacgaggactcttggaggtattcagagccagcctcctgccaaacagcatactttgtcaaagtggaattgatatttgcaagctcaaggcccttcttggagagcatcttttgctcgaaatggctgcctcggagttctcaaccgctgaggcagctctacctagtccttcatttcttaccttgactggggcaaccagccgttccacagccacctctggtgtgaaacctataaggattctctctttttattctagaaggggtctgggtctctggcatgctgagcggccttcaaaaccacagagggccttctttgatgccatggatgagtgggttctgaccgtccttatgcccagcatccagggatttgcactagctctcttcaggtcacctggcacatggcctgggccccctgcagaagcccttgccacacaggattaggaaataagacagactgaccaggggactgatttgtgttcccttactctcaaacgatttcaaaaggaagaccagttttctcattctatactcacatttttcctgaagaggaaagcaacaggacttgggtttttgcaagtgggagggcataaaatgcattaacaccatagaagtgcctctagagggcttggtaattacagcctcaatgtgttctctaccttcttaaaagggcaaatggaacttctccttggagtgtctcttcccttgttcttgagacataaatcaggataaaggtgtcgagaatggtaaaacaaaaacaaaaacaaaaacaaaattcaatgaaaaatctgaagcatcactcattttgcggtattgttccatttttaaaatgactgtttaacatttttccccttttttggcatctgatagtacacataaaattccaatcctttattgcccccaaattatttatatatgcaatagacccagaaagagaagcagaggaagtgaagtgtggtcctccggccatgactttttgccttggttttcccagctattaaaagggagatatcatcattcattcaacaagcatttcttgcggacccattttccacgacagaaccatccaaaccaagacacttcttcctattgtggcaaaaatgagcaacgttaaaactccccagaatgcagaggtgactcacgtgtttatgtaagtaagcatttagatatggctttggaaaagaaaacacacacctaaaagaggctaccagcatttgaataaagtgtgtaacctgggtgttcaaaactgtacaacagtttctgtgtactttaagtcactatccttcatacttcttccctttaaattctatttgaaactaaataatatcaacaatactttaagtaagattatgctggtgttactgatgaaattatatgcaggtctgcttggcctgttctcatgcgtaagcctttgataacttgttcctaggttatccagttctgcttacctgagtacccactttatcccaggaaacgagacctgaacactgtgtcctggtttcatctttccagtgagccaggccttctgaggcattagcggctcagcaagaccatggaggtgagagaggcacaggcacactccagatgcagggtctctgccctctgtcaagagtcacacggcagagaggacaagactcctgtcccgggggaactgtttttccttttgccccacaccccagatatcttcgtgacagcccctgccctgaaagcccggtgagcgtcatggcggagaagccagcctgtttccgattattctgcctgacagggactatctgctgctgtgtgcagttgtagaaatgtcataagctcaggactcaggacactttgacgtcgagtccaacaggacccatagagtccccctgaacaattctcatctgtgtgggaagcctaaggggtggttttaagtaggggctggcaggagagtgaggtctgggctgcttctttacggctcttcaagtgccggccatttcctggagtttcatgggagtcaagacttacttttggcctcagacacagtcaaggatcatcctgatgcaaaaaacaaaatcacctttgaacctcttcctccacaccatcttccactttggttttccgctatgcctttgtactggggacaaagactatccacgaatccttactttaaaaactgaggcagtggctctgaatcattcccccttggacacccccacacatctgaacaccctcgtgtcccaacaccacatctgctgaagttgactggacctgaaatgctggaggctcagtgttttcggaaactgcggagagttctcctgccacaattctcttgttgtcgtcaaaagcaattacatgtttcagatgatgaaaagcactgtcatgaaaagctggcacagcagccaaggagacagatgtattaaaccacacggcttctcagaactcccacttacgttggagctcagcacagagatgagcatggtgatatccccccgtctaacatcctcccatttggatttaatgcatgaggctcgtttctgatgaggtgccaaattctttcggtggacaaacacaaagttgcagaattcagtgatcatacaagtccatgtcctcaaacgaaaataataatactataaatgcaaagatgctaccataaaaaatacagtaggtggacttttgtgagtcaacataaaaaaatccagcatttctaactggtagcatgaggagtaccagtctgcaggatgttaacgcactgataggctatggacaatatattccacacttacggaagtggggaaactataggtcagacaaagctacaggtacttctttctttcttttttctttttttctttctgagatggagtctccctctgtcgcctaggctggagtgcaatggcatgatctcagctcactgcaacctccgcctcccgggttcaagtgattctcctgcctcagcctcctgagtcgctgggattataggcgcacaccaccacacccggctaatttttcatatttttagtagaaacgaggtttcactgtgttagccagaatggtctcgaactcctgacctagtgatctgcctgcctcagcctcccaaagtgctgggattacaggtgtgagccacggcactcggcccaagtacttcttaactgcaggacttctcagaggcttttaatatggtaatgagtgctgtgcagtgagatgactcaaatcaatatatagccaacacgtttgatatgaccacagaacccatttccctgaacactttttatcacctcctagagcaggggtcagaaaactactgcccatgtggtctgatctggccactgcttgttttcgtaaattttcactgcccacagccaacctcatttgtgtacatgccgtccatggctgctttcacactgcagccgcagcgatgagtcatgagacacgcacccgtggctcacaaagtctaaaatatttactctttggccctttacggaaaacgtgtacaaactttgtcctctgaaatatagtttgggaacctacttcactcatgatatcaataattctaaaaaatttcaaacaatttttaaagtcaacattgagaagttttccatggttagaatttaataattacagtcaataactctcttaaagcatcgtgacaataaagtagaaggacactgtgtaattctatatggtctctgtcttcagggagctcccaagctagtttgtgaaaaagagaactcaaggcacaaacaactggggggcaagagatgttctaaacactaagaggaggcaatatggcatagtagaaagaatgcaagcatgtgtaagagtaaaacatacacagggcgcagagtcacaagagtcaggggttggtcttggctgtgataccttctcctgcgataagagtaagacctgctttattgagcacttactatgtgccaggcaccatcccagttgctttccatgaaggattgctctttaattcttatcataatgaataggtactattattatcccagtttatgggtgaggaaaccaagtcttaggttgactaacttattaaaataaagcacatacctagtaggtggtgaacaagagccaaaacaagtctgttggtcagctaaccaccacgttatagtggctgctgcttaggggcagcatatatcctctgcatttccccagaggtgacagaagtagtggagagggtagtgctctctaggctctgacacacagcccatgtttgctgactcaacaaccacacaacgtaatgctatggcacctcaggtggcagggagggtatcgtgggctggactgatcttcagaaggctgcatctgagcagggtgtggaaggatggcagaaggaagaggggagtgaggcactcagggtagacagaaggtgatactgccacatcctccactcagaaggaatctggaaggttttgacaaatatgtacattttggagtgggaacagcagaaagtaggggctggctacctactttccactacccctatccccactccccctagggggtgaggcagagataagcacgctttgtggggcacactgatccacaaacttgcaagcctgagctccactcagcagcagcctgggcaggatgaatggtggtgtgcaggtgtttgcggcatgcatagcttctctttctcctagagtcaatccagtgatcccctgcgaaaagaatcctccacttgacctgaatgctctgtattggcaccttctggacaggaatcctatcgggtatttcatcaaagcatcccacagcagttttaagtgtggctccatgagagtaagacaccaggacagctgtgccacctagtgatgcttgcctgtactgtctgcatcccagagagtgggagaggcttcggaaaggactggtatttgctatttttggccaacacttctacatgcaaaggaatctgaagtctccgcctgggcttcaaaacatttcttgtggcctcactgaccattcccgtgagcctcaggggacatgagtgtcttcaagctaagagggagcagtccaactctgcagcacgaattaccaaggaacatacaacagacacttcccctcctccatttctgcctttcagcagaaagggagggtgcacctcctcttacatcctattgtggctgcaataacctgcttgctttcttgtgcagcctggaagtcttatgcacacagcacctgctgctttctaaactaaatagaaatgctatcgtctgcagtcagaaacagaaaagacagaggatgcctggtgaggatctgtcctacatcccagagtgcaagagttaaaggtgctaaccattagtgttatgtgggtgcagcttatgcacacagagaatgatcagtgttttcatttaataggaactctcctccactcccaaacacagcagtggagggaaaggccttttaagccttattaaggttgaggaaaaactctggtgaaattatactacatatttttgtttctttctctatttcagattccttgcaagaggtccactggaaagctagaattctagaagtcaggatgggaaagcctcatacgtaatgcttttgctcctttgaattacagttaactccagtggtgccactgacactgctttcgcgtagtggttctagtatcgtacgatgctgatacaagtaagctatggctatgtgttttccgtaagaaaggaaaacatcactccaggagagaaatggaggatgaatgatatttatcagattgtagcttctgaaaatggatttgctttaccagatcaaagacagcctgtttctacacatcaccaattctgtgggaaacattccagatattctgagagcgcattttgagactgagtagttggttccctcactgactgtttctactgtaagtaatagtatatttccatgcactcttgattggtattatacagttcatcaataagacaaaagcagaaaagaggtacaaagagaccaacagggaagaaagacgcgaagatgaaaacttcagcagcatgccacgtacagttggcttggatgtaccctgcacaaaagtgtccagcctgtacctcgctgacctagctgttcgccggtacaagattaaggaagtgacagcttttcctaattcactgaaagtgctttgggactaaattgtagcacagtataagtaaagtatcctaaggggaaaagaaaactccatattcatgatccttaatctattttattgattaaagatttagccaaatacatcactcctgcttttgtccctgtaacaaccaatgctgtgttatcaggaagagataaaaccagacctgatcggagctactcaatcacttggtcctgaatcactcgcttttcacccaaagtcaacagtcttgattcctcatattttaaggtgttcattgtaatgtactgttactgtttgcatacagctgtcagctgcaaaaacatttttttttttgaacacaaaaatcaggcttttgccccccaacacccacccccttcccgggagactccatggtagcctactgactcacactgacaaaaaggacaaaggccctgggttgtctctgccgcctgcctgtccagatgtaattaggcctcacacaggtaaccccttgggcagcagagaaagctcagcgagaaggcacggggttgtgaatacagtttcacgatgatttccatggctgccatgaaggctctgatcagctacaaatgggcagatgccaggatgaccctcctgatttcctggtccctcctggacctggatctggatctggatctggtgtccagggaagagcaaagaccaggagaaagaggtagaatcccagcaacaaagcctgggtatgcggtctttgagaatgcctcaagaaaacaaattcttgcttctcccttttcaaggggctacagggagacgacacagctgatgggtatttttgtagccagatatcaagtagtgttaacgttgggcataggttcaaacaaatgtgctccgttaagaatctacacagcatgaagagtgtttagacttcatgatatatatatatataaacattcttcagggagggtttccttcagaaaattcaatactcaaggaaaaggagttagggacagtttattttggttattttctttgtttgttttctccaaagctatttcttgaaaaaggaatcctttcaaagtaaataaaggaatcctttcaaagtaaaatagactacattacatttttatcccaaagctgctgggtggtaggtgtgacttggaaaactgtagtttgtttcaagcaaatccacttggattgagcatgaaggaaaataaaattaaaggatgatgacgaataaatggaaatgtttaaggatcactttggccagcatcttcatacttaattgttgcttttacatgtatgtagtttttcctgaacacaagaggaaacgtatggtaatgtgaggaacagaaagaataagatgggaaactaaacatttgaaaagaactttcattttctgaaaaaaaaaaaaaatgttctcccatagatgcaacagaattaatcttcattagttagcacagctatactcttcttcttaaatgtctcaaatgatactgtgacttcccttagagaggaggaaatcagaggacagcaggaataattaagacagtagggctaggggcatagcaacaggattggaacccaaagcccctggatttctcatcctcactgaggcacaagaaacatcaggccttttgatttaggctccaagcaataattagcatctaataaggtcccttcaatgaggatttttacatttatttcctatcactagtatattattttagatactctaattacttttgaggtgctggtggtatatgaataatataggtaaatgacactacgagacaaggcactgtttgtaaatggccaaattctttgggctgtactaatcaaacaatggttgactctccctttaactttcatcatgcatttaaaacagtttttttttgttttttgttttttgttttttttttttttggtgggggagcagtgaggcagcgtctcactctgttgcccaggctggagtgcaggggtgagatcacggctccgtgtagcttccacctcctgagctcaatcaatcctcccacctcagcttcctgaatagctgggactacaggtgcacaccaccacgtctggctaatttttgtatttttagtagagacagggtttcactatgttgcccagactggtctcgaactcctgggctcaagggatccacctgccttggcttcccaaagtgctgggattataggtgtgagccaccgtgcccggcctaaaacacagtcttgaacttatctggttaagtacaaggtgctaaaggtgccacttgaccatcctaagcctcctcttcttttccccatttctcactttttaaaaattcgaatttattttttggtgtaaagcttaatagcatgggttttaacgtttttgagggctgcttttcattcagaattttcaccactcttcatcgcagcagttcctggagtaagcatggcttcactaagggaccgaggccacagtgagaattaatatttattttttggctaatgtttacagagtgccttaagctgttcagcaaaaatcacttattttcccaaagaaaacacactcatctcacttctctaccgtctctcccgcccctacaatgccttgcaggtgtgtcaggttctttaggtgttttcgatgttcaggtcctgtgccaggccattattaggcccaccctacaaaatgactttagcaaaacggaggctgcttcaaaaattccagctggtttttcaaagtaatactaagcaaaagtacacaggcagaaaaatgtgatcatcctgaacttttatcacacatcaaaatttccctcctatatttttagaaccatttcagtgaaaagtgtagaatggcatcgctaatgtttataggcaaagaacagaatcattaggatttgagacacgttttcagaaaagtgcctttaaataattaacgtcatgacactcttcctcagttcttcatccagcagagtaaatgtctcttgacaggtaatagtcctttatgtgaagcagtaactccagtttggtcaaggtaactagtgttattgaaaagcatgctttaattaaatgcaatgtcttagaaaaccatgctgtttacaagcaataaacaactcttaaatattcaattaatcagctatcaacccaaattcataaaagacccacatactacttctatgctttaaaaaggaaaagagacatattaagaatgaaagcagattaaagaaaagagctaatcaaaaaataagaaaccaggaaatgacattgtcaatagtgagcacccgttttggagtgtgcgctatgaatttgctggctccgacagtaagtattcctacatgggctttctcatttagcactaccctaaatcctgtgaggtggttattggcatccttccattagatgaagaagctgaggttcagagacgttaagcatcttgtccaaaggcagttgctcttaaatggaaaaactaaaattcctatctggaactctctgaatcccatgctccttccactattcacagtgcctctcaaacagaagaaagtaaaaaaggggagaaactgaagaagtcaaaacccaggattattcagaagtacggaattaaccatattttgggtaaatatgtgttttccagccattggatcaaccatgatgtgattcaaactggcttttatgaaagccaaagataccagatggaccatccttcaatctggtgtttttgtcatctaaacatggttctagaaatcaaaacaaatagaaacatgaaaagcatttttttaaaatatgggcaatctctattctagaataaaggcaaagaatgaaaaaataattatcaaaaccattcctagaatagacagggcctattttaacatttaaaaaggcagacacccgtccagtttccttccgcaaatagtcaccaatcactacttctgctgagtacagataaaaatacctgatgtggttttccaaagggcttctcacagtatttggcctattcaacctttgcatctgccttccctcttggctcctgacttttgtcagctgtaccatgaaaaggcgatgcctttaatgatctacatttgacaagactggaaattaaccttttagtgaatctttcacattcaatgtgaaacaacagaaccggtggtgatgtgacatttttggtaggtgcgtacctcaaaggcgcctgccttcaagatctccctgaacacccaagggtatctcaggctgccaggtctccttagactcgacaggcgaagggagagagaggaagggagagagaggaagcctgggcaagctcttggaacatctacataaaatgaaggtattcaaagctgcttctatttagctcctatgcacttcattatacctggctttttaatattctagtataaaagagaaatacaggaaagagtcagaatattgtttcttattgtcaagccccccaatgcagaaatacacaaacatttgacttttatgccccacactcacacgtgatctttctgccagcatttctgggaatgatcatgtttagaatttctgctgggaaggcaagcgccttcagcatttctttagatgtcatgaagcatttttaaactgaaagcacatgaaatttggagtcagctcataacactgacatgtcatagtgaaagtaacaacaaatacttacttgtctctaaggtaccatctttcttgcacccccacactcagtgtgtaatgaccacctctgagacacagacatctatagaaacttcttgtttctttgtctctttcgtttctcctcaacacagggaagcaaggggaggagaaaccatggaaaagtgctagcctttgtacagggccaccatcaagatccagcacttaaccctgagcaccccactcatacttactggagagcaatgataaatctaagtagatggcttgaaactctaggacttctaaaatctctctcttcattcaggaatccatcctcctggaaaaaagaccactacggatggggaagtttgaaggacaggcatttagacctgaaaggcatttaagaggagattcagcaaaagatcctgtgggactaaggattttgcgagtcattcttacatgagtgtggcttgctgctgactgagtaggatgttttctgctgctcagtcctcgccccttacaggcttgagtagttggggaggcctcctgaaagaggaaggactttaatcagactgtgatgagggcagggggtcccctggtagggaggggagcaagagcaaaggaggagataagaacccgcaaggtgttgtgagattgtgaggaaaaagcactagtagaaaggtgacttttagatgagggaaatatagatcagaaaggcagggtgtcgccaggcagaagaaagctagagttttggagttcttccatggggagcttctgagccactcttggcacccttaaccattggatgagtgaatgtgcaggcggtgccagttcaggaggaagaaggaaatgttttagggaacattaatcttactacagggtcctggataactttgaaggaagtcagctcaggggtgaagaaatcagcttagaaagcaaggaacttagcccaagtaggaggtattaaggccctgggttcaggtctgtgatagaagtaagcaaaaggggtaatctgaagaacgtcaggaaagttacagactaattgaatatcaaagggtgagttggggaggacagaacaaaattgctgataactaagcctttgtgctggagtgagaagaagaatgatgccagtgttcacagagccaggggattcaggagaccctctgtctagggcctagcactttgtatcttaaccagatagaacacactgtatcatcacactgtatcataacgtggcagtgctgctcattccactgtaaactaggcaaggacaacgtctctatgttatcggcctttctatgtttaagcatccaaagcccaacgcctaacacaaaaggggtggtcagtaaatacctgttgtacgaggcaggtttcattttggaggaagatgaggtagtcatctgtaaaatatggtgaatttacggtgataaagcatttccacaggcatgataaatgttgaaattttggagagtgaggtcatctttgatttcttccttaattactaactacctctgccgttcctctaatagtgcacaaatactcctgcatcttcctcctaatgtctatcagtcatggcctttcctttccaatgggcagagggatgttacagctctgaagacagattatagtctcctacagagagtgcagagagaagataagaaagccagtggctgagcctcaggggatgcccctatgtaggcagaggaggaaaaagaggaatgtcattcccagttgctgtaatagagtcaaaacaaccaagatccttgcctactgagagaaacataagatgtaggccaatggggccatgtgtagatgatctcaggtatcagatgttcactgcacaccttagagtgatgtttattcaactgtagataatatttaattgttactctttgaaagatagttcactttaagttccctgagtagcatagagttattcaaatgtacctatttattacaagaccattgtataaggaattatgaatgtttctggaagaatagggatttgtagaaatcttccttgctccatacaaaatctgctttgagatacgttattgccatttctatcaacagaatctttcctcccagtaggaaattagagcccaggatttcctgctatttatgagttataataaaagattcttcttctcaatttttttttaatgtgtcctgtccctaaatagggctcagcctgaaagctgggaaaaggacagatggtatcaaggagaaaaatgacagtgaattcaaagttcccgttttggcagccaatcactctaatcaagaaaaagggatttggttactttcaataataaaataattcttaaaatgtaaaggatggaaaaaatgtaaaggatgaattaaaacagttccacacgaagaagaagaagaagaagaagaagaacaagaagaagaagaagaagaagaagaagaggaagaggaagaggaagaggaagaggaagaagaagaagaagaagaagaagaagaagaagaagaagaagaagaagaagaagaagaagaaagcctttctgacaagcaccacccaactactagttccatggaggtggaggggtttccgtattatttgatttatcttcattgcctagagcacaatgtggttccagatctcagtcaaacccaggaaatgaatagattgtaaactaaatcctttcagggagagacagagttcacacttctcaggatctccaccacgcctagtatcctgctgggccaaagtgcgtgcctggcaaacatgtccctggtacttggacatctctttcccgcgttcctcttggctctccttccttccactactcattctgctcctgggagagttaatgcattgcaggaacccttcttccaggcctggtttcaggtggctgtcatgacagcaccccctgagagcaggcacttgccatgggtgcctttcaggtacacctcagggtaggggtcgggggcaagggtgaccgtgaggttcacagcaggggatgaagtgaggagaccccatccaggtaaataacacctctcctgactcccaaccaatgtgagctgctcagggaaactgtggaccccctcactggggtgaggttctagctttctcatgccaaggactcttggggaaggcagtttgggatgcgcttcagtgatccagccacctcactctttctagtgaaaggagaaaaatggctggaatcttacatcaagacaatggaaaacaggggtgtccaatctttcggcttccctgtaccccactggaagaagaattgtcttgggccacacataaaatacactaactatagctgatgagccaaaaaaaaaattacaaaaatacctgataatgttttaagaaagtttacgaatttgcactgggccacgttcaaagccatcctgggcagcgtgcggccgatgggccatgggttggacaagcttgatataaaatgtcaagcctgaatctaaaagcaggtatcctcaaagtcctcacggctgaagaaggagctgctgttcttcctccctggaatttggcattaaagggcattgcaagggctgggcgcggtggctcgtgcctgtaatcccagcactttgggaggccgaggcgggcggatcacaagatcaggagatcgagaccatcctggctaacatggtgaaaccccgtctctactaaaaccacaaaacattagccgggcatggtggcgggcgcctgtggtcccagctactcgggaggctgaggcaggagaatggcatgagctcgggaggcagagcttgcagtgagccgaggttgtgccactgcaggcgtgcagggagacagagcgaggctctatcttaaaaaataaataaataaataaataaataaataaataaataaataaatacaagggcatcgcaggaagtcctgatgtcaaggtaatgcggccaggcatatctgttgttgctgacctgagagctatggatgctgtgagcaggggcttggtaggccaggatagacaaacttctgacctcgcccctcattctaaagtgtaattcccagattttcagtaacttacgtaccaacctctaagcccctttatggttgattcattcctaggtatattaaaaataattcaggtttacataatctatctctaattgcaagagttaagaggaaatttaaactactgctttagttgttgggcatatgggtctctagagacagggtgttaagcatcactgcatcaccactttgcatataggaagcactcaataaatgttagtaaggccgggcacggtggttcacgcctgtaaccccagcactttgggaggccaaggcaggtggatcacttgaggtcaggagttcgagaccagcctggccaacatggtgaaaccccatctcaactaaaaatacaaaaattagccaggtgtggtggtgggcgcctgtaatgccagctacttgggaggctgaggcaggagaatcccttgaacctaggagacggaggttgcagtgagctgggattgtgccactgcactctagcctgggccagagaacaagactccgtctcaaaaaaaagttaattggaggaatagaaatactataggtaaagacagtacccccaccctatggagcactgccacctcttcaccaagtcttcttggctctgaatgcctgacagtgctttcaatgtggacacaggccttgtccccacacagggtttttgctgttctgtttgatcaagccacagaactggggagacggctctgggcccagcttcccaagtttgtctttttcttagtcctttccctgagatgcaggtcctgtcttgctcccctagcccctagcctcagccaccctctactctctgcagtgctgcatggttgattctgtatttcctctgcagcctgcctctctgtgccactctccttggagaatgagcagagcagagccggacgccaggcctggatggagtcagggaagaggtctcagaggagggaaactttaggggagtgttgagagacaggaggagcgagccaagtagagaagagcagggcgagtgattcaggcagaggaaacagcttgggtaaaagcatagcatgtctgtgacccctgcttctcagatgggcggccttcaggactctctgggagcatttgcatatcatatgtatattaatttatgtattcaatgtatgctcagcattcctatctggagtgatgagagtgattacgctccctcctctcccaactgcacaggcatgcaacaggagtgccttatccaattgaaaaagcagtctccatccccgagtgagggtatttccatgctcactaccaaggttcagggacatgctccccagaaatagtctgtgatgaagcacgtggtagaataaggcatcccacttcacatgaactcttgttttctatatttgtttttttttctaagttatgataatctgaaaatgacagaatttacacagttggagtatatttcctgagatcccaccacataaagaaaagatcacaatataaggcatgaagagtgggaactcacagacccggcgtattcaccagtgtgctccctgacctggagaacacaactgcagttgccaggctggccctgtgaagcccacaaatcaggacacgccacttaatggcaccaccagcaacatagccttcccttggagactcaataatatctgaacccttcacggcgtggagctgctgatgttcctaactacaaattcaggctccacagaaaacatggcttctctttattttagattatcttattttataaaaagcaagaatatataaaagatatagagaaaaaaggcagacagaagccactgcccagtgagaacgtgctggaatataaaaatgtaacttgataaaagaaacagttacctagaacctggtatacagtaaatgtataaagcattttatctttcattatctaaatgtgaaaaggaattaacttaagatcacttgaccttgcaactgtacaaaatgaatttttgtacattagtatgatcaaccaacagtgcaataaaatgtaaaataatatcttagaatcagattagcctgggtgaaatctttgtcctcctaaactgtatatccttggaaacacccttgaaagtttctaaaggctcagtctcttcatctttgaaatggagatatctgcctgctgaggagattagatggttcatgggtataaagtatttagagtgcttcctggcacatgtgtgtggtcaatattaactattgttattagaaaagaaaaagaacactaaatgacagtttttccatttaaaattcccaaatcaggtttcctgtgaaaatggtaaaacatgagccagcattgcagaatagagagcacgtttggcctagctactgaaactgggaaaatgctaggaaagccaagttcttgtcctggtgctgaactgccttccgtctggtgtgggcacgtcagatcaccttgccggggctctttctcgcttcagaataaagtgtgaatggagttagtgctggataatgtatcaagcccataccagccacaacattccagagtcaacctcgagggcagctgtgatggcaaaagtcaacacagtacattttataaaccataattagaggacagagtgatcaggcctattgcccacattatgtaattagccctctgcctacagggagggagtgcctgtgtgcaattatgcaatcacattttgaagggaaagacaccaactcacatcacatcatcaagaacaattatgattcacttgagtcacagtttccatccgcgaaggttgtccaggtaattttagtctgtacctttgtagtgccaaatatttaaatagttccttatttttgcaatgccttgcaatacaaaggcacatttacatgacccactcttactggctttatattagaccgtcaagttacatcccattatacctggaccataacctactactcccacacaagcaaactgcagggatctcaaactttagaaccaagagagtcatcagggagcttgttaaaaatgctgaccctcctcgctctatattgattctgcaggtctactgtggagcccagggatgtgctctttttaacagcctctccaaattcctctggtgtcagtggtccacaacatgaaaaaaaactcagatttaccatggatagctttggtggagacaatgcagatggttgcaggaccagcattacatgaattgaggcttctgtgcctcccccagtcattgggaagcatgaaaagctactgcccaatccccccatcccctttcttggcacagaagcagaactctagaatttctaggctataagccaacttgggagcaataaacattccccaagttccccactccaccctgtcccttcacacataatgaagctgcttcattacctgccctgagctacttaactcactcttccccatctcccagcaacagagactaacatcaatcactaagtgttcccagtacatcaagcaaggagaatcttgagtccaaagcaattgagaaagcaatgtatctaaggctccagaatgtatcacaaattaacaatagtgttatcactggaaactcagctcaaatgtcacttcttccaggaagacttccttaaaggtaacccctccccacagaatctgtttaagattttcctcctaggtaataacatgacatgcccacaaaaatcttcaccacaggtagcaagtatcaaatgtactataactgtttgtaactgttttatttagactacgtgctccttgaaggtgggggccatatctgtatcatctttacatctgcagctcccctctgtttcacctagttaattcttactactctaagttaaactgccattttcccatgagagccttccctaacgtaagtcagtccttactataaatgctcatcccacccttttcttctcttttccaacacttcatgatgcttctattttccacattgactggttaaaccatgtctctgcaatcccactagctccatgaggacatcaaaggggaataaaacaaaaaaaaggtattcaaataatatctctttaataaataaatagattcagatgacaataatactagcctgggagaggctggtcagagaatatggggcagagtgggatacctggatgttctacctttaaggtgccgtttgatcttggttgcttcctactcttgcattcaaagaatccagtataaagctcatgctggtaaaagtttgactgcaacactgggagagaaaggaccttttagagcacaaaaattacctgccaagaccttgtttccattgcataacccctaactttcatgcaagactctgatcctactcctttaatctgactacatttcatattctccaataacttctccattctaccccaaaagcaggcaatttatctttctaccatggtcagtgttcccttcaaggttggttgcaacttgggtgaaatatctcagtggaaagccaacaactgaatcccatgctcaattttcctcttctgggctagggtttgggccttttacttatgtctatttgtctgagaaatttactaatgcgtctagtggtttttatgattgtaaagacccagtttgcaatggtatattggcactcatctacattccacatgcatcaggagcttcccattttcacctatcactcatcaacttttaacaaacacagcctaatgattccatggtggtagacaggcattgtggaaccagaaaggaacatgactctgctatgtgttcattagccgtaataacacttcagaaaagaaacttaagaatgttacatgtgtactataaaatttctttcatctgggaaactttttttaggaccaaagtgacaaagatgtgagtagtctacaacttgcacaattgtgggaagacagggcatattcctttttttttttttttttttttttttgagatggagtttcactcttgttgcccaggctggagtgcaatggtgcaatctcagctcactgcaacctccacctcccaggttcaagcaattctcctgcctcagcttcccgagtagctgggattacaggcatgcgccaccacgcctggctaatttttttgtatttttgtggagacagggtttctgcatgttggtcaggctggtctcgaactcctgacctcaggtgatccacccaccttggcctcccaaagtgctgggattacaagcgcgagccactatgccccgctggcatgttccttaagaacacagaataccctttcaagaagttccagctctttttggaaccaagtaggtaaaaatgtcatttctcaagtccaaagagtccaaatcttccttcttctagatccacatgctatgaaaggaaagggttcataagaccaaaaaaaaaaaaaaaaaaaaaaaaaaacccaaaaaggtggatagcctaggccttggtccactgagcactgtcatttttggcagctgcattaaaggtacgattgtggaaaagaatggctgtaaccctgatttcaatgtcagaggttaaagatttagcccaagtgctctagctctcccaagttaaccattattgacatattatctatgtatgtatgcattagtctaaactttttttctttttttttttttttgagacagagtctcactctgtcacccaaactggagtgcagtggcatgatctcagttcactgcaacctctgcctcccgggttcaagcgattctcctgcctcagcctcctgagtagctaagattacaggcccatgtcaccatgcctggctaatttttgtatttttagtagagacggggttttactatgtcagtcaggcttgactcctgaccttgtgatccgcccgcctcggcctcccaaagtgctgggattacaggtgtgaactactgtacctggcctaaacttttaaactctcattaattttcaacttgtgcaatttcacttaaaactgcctctaatgatgttgtcgacaacgagggtaatggtagccatttgttaaatacttttataaatttcaaaaattatggcaggtggacatgcatctctcatttaatgattttaaaaacaattttaagattgttatttctttcctcttcagataagaaaatcaagaatcagaatgattaggtgaaatgcccaagaccagacaaataaatggtgggacaaggatttaaacactggtgttctcatccggtacaacatgctgtcaccctcaaaatatatacatatgtactgctgccaggttcaaggaacaagtccaagtttatgcagtcctgctctataatgttcatcccatccattctcagcttcctacataaaagatactaaatgcgtttgcccttccaaggtaatatctgaaatcccttggctactttagccctgtcagatccttccttggttttgttaggttgttcttgaggagtattggtctagctgtagatgatattatgaatggccagagggtcagagatatgcttttggtctttgattccagcatcctccatgattatacccagcactaggtctctgaaccaaagccatattttggtcaaaatatttggagaaatgtctgaaatgatttataagcccattttctaggttatcacctataattctggctgctcacctccagttgtaatttgaggtgtttctttttccataggtttggttcatatggatgctcttcagtctctttttaacacacttggcccatgatggctttgtatttctctcttagaaagattcagaagtttcactacacaaaacgtatagagaagtgttaaactggattagctctaaccaatgcttaacggtgtgcactgtctatagttctccattcagagaagtaacattgtatatctaaccactgtttcctctcttgaagatagcctccacccatgagagtgtttcctctgatattacggtcattaacaattttgatggaaggaaatagctggaaaaattcactatgtcaattgcatttatttgtcagagtctcatgataatggttcaattgttccatgttccttgacatcctggactcaacttcagaatatttcattgctctgggcatctaaatgtatacaagcaaagcagagtaggtggttgcacaattgttctataaagctgagctatccatttagtcaatataaaccattctgggaagaacaggatttctttgctcacatcaggagtctcaggtactggaaatgaccacattcacccatgtataagctttagcttagctcatttagctcaagacctgcaacaagtcacccaataaaatagcaaaaattttcttgggcacacaagcagttaaaaccatttctccactcagtgagatgcagaaacaagtactcttgaaaaaacaaagagaaattagtctgataatggaaaaccactgaaagcaatttatgaaccatttccccctgacaatatagaaactcttaatatactgtacgtaattcagggtgggtcttcttttgattccttccttctaatcatccacctttctagcagtaatactgacatctgaatctctttttctcactgtttcaaagggatatacgatagcaaaaatggctatgcagtggatgaagctaaaagcttgtattgtttattcaatggtacacctctgataatttaaaaagaagattaatcaaccagctgtgaaaccaaatatttgcagaatctaagcacttatgtaaaaaatctacatttgtagctgtgtgcccttaaataaataaactagttgatcactgcaaattaaaagaacttaaatggtaaaaactgccatttctttaaaaacgatgacagtgaagaaaaagcttttgcaaataaaattgggtggagaatctaataaacagggagctatgccatcccaaaggagaaaaaagcaaaaagaaatttcagaaaagataacaaattagtttagcaaagtcacaaaaagagagggcagacaaaaataaaggcataggatgcagcgtccagggaaagaggaaggggcgagtggaaacagctggaattgttcagctgtgtcaacattcggctgtttcacagattgactagcaaagtgtcatctgaaaccaattacattcccaaaaccccacggacccagttcataacattgattaatccacattgtgaaaaagtccccaagcaaaactagaacagctgtcagcccttggagctcaaaaaacagcaattgcttgaggaaaaaaaaaaggaaagaaaaaagaaaagaaaagaaaagaaaatctcctcttgaaattttagggattttcaggaggtatgtctactgaaaccgaagatagatttaaaacgaactcctccacctcctgtctgtttgagcacaactggctataattagaaaagcaggggtcatgttagaataaacccaaagtccattcccaaagtcagaacagaactgcctcacagtctctaataccttgtatctttttgctcctttctggagaaaacaccatcgtttgatgtttttaaaagtatgtttattttttcttctcattattttaaatgcattaatctactccctttgggcccataaaaatgtagttatatgttatacgttttctattaaaagctgtttttataccgtttgttctatttcacagaggtagaagaatacataaagtcctcgatttgcaagcatccaacttgtgcatgactcaaatacaaaaatggcgaccacacctctctgatgtgcaaaactactggtataggagcctgtaaaggttttcacacacacccgtatgcccccatgggatcctagatacctggtaccttctagcaaagccactcatccgaagatgactcactcatggcaaatgccttggccttgactctgaagctactgcagctagaaatccaccaccaggtatggtagaagagaccccaacaccatataagcagccacgaacatctccttaagaagtctcaatttctgtagaccctggcctaaactcaccactgtgaggatgcagaagttgtaggcatctgatcctttggacagattttttccacggaaataaaatacatgcttattcatctgctcattcattcagcaaacatttattgaatgtctattctatctcaaacactgggttgtacccaaaaaagcaatgttagcttacaaaatgtttgcacatgctgaattttgtagatgggtaaactgaagctccaaaaggtttagtgacctgcccagggccatctaactagtaggtgttggagtttgtactcaaactgaaggctatctgataacatttcatactcttttcaaaaaccatatttactacattatgcttgacacaggttttcataagctagcaggggagcccaaaagcatgcaaaatatagcttctacctggagatgcattccaagttacaaaaaactgggtataaattggactttaagaacataagcggtttacatattcagattacattctacttttgctctctcctctgtaaataccccattagtaatctaacggactcctctgctgaaaagccatagtgtaattgcaagttttatgaattgaagtatgtctttgatacacttatcctttttcttctgcatgcttatgcatatgtagcactaaccaatattaccaatatgaggttgtttctaagtcaaagcattcagagaaacacaaaccttgacttcactggtacatccttggatttgaaaaaggggaggggaagggaagggaggggaggggaagggaatggaggggaggggaggggaagggaggggaggggaagggaagggaggagaggggaggggaagggaagggaggagaggggaggggaagggaatggaggggaggggaggggaggagaggggaggggaagggaggggaggggaggggaagggaggggaggggaggggaggagaggggataagaagggagaggggaggagagaggggagggaagaggtggggataagaagggagaggggaggagagaggggaagggaggagagaggggaagggaggggagggggaagcggtggggatggaaggggaggggaaaggggaggggtagggaggggagaggggaggggtggggaggggaggggaggggtggggaggggagaggaggggagaggggaggggagaggggaggggtggggaggggtggggaggggagaggggggagaggggaggggaagagaggacccacaattcactgagccatacaaaggaacaggcttattctttggatttcagaactgagatgaaggttaccaaaagcaacaaattattttagatgtaaagacaaagtgttactaaatactgttctccaaatagtaataacattcctggagatttgcaataggtaccctccctactgagttttgaaggatgtgttgggtgggacagggtatagtgaatgagtagagatggggtagagggaggatactcaaagacaggacagtaagaaacaaccactaaagtctctagacagatcctctgattctttttactattttttcaccctggaggatatttataattattgttttttaaatgctcatgatgtcacagataaagaacaccaattgctcccaatagaactctaactacagtatgtgtttacaagagcaaattactgtttatacacggacaggattgtgaatgaggcaaagaacattacaaattatatgttactaaagaaaagccaaaacatttccttttttttttctttttatgagaagacatcattacctgtatatgccccctcttctcagttccctcaatggacattggcattgatgagcccataagtacatgataagcctacaaggacaatagtgagtttatatttttatgtaatgattttagaacatgggataatatccagagtgatggaggtaaaactattcacatttccatattccaaactacttcaagaatcactagagtgcagaagttataactctaaatgctgaatggagaaatcatctgtcccaagaactacacccatatgactttccaataaatctatctcaaaaggcctaccatttaacaacaacagcaacaacaaaactttaaaagaacccaaatgaagttttgtataagttggtgtctttttttctatacattttgaatgacaaaaagctgctgtgagctacactgtttttattttattataaaccattcttattttataaaacacagccctactcccagaaaaaatatttttgtgaactaatgggggtcaagacatatatctgaggctaccatatgaccctaagaagaacccaaggaatgcagtattaggactgcctcattgtttgaaatattgttttaaggattaaatgagtaaagcccatgtacagtgctcagaacagggcatggcccataataaaagtgttggaagcatgttaggtgttcaaaatcagtgtttgcattccaatggagttccaggaaaagtgaattccaggaatttatgtttgggtagacctaaggtagttttgcaccaaaagaagactttgaaaacggagggtttcctgtccacttttcgccaccatcaattgcatcttttcttaactctctgtagaaaagaagctgagaaagagcagacagtgcatgtctgcactgaagtacaactggccaagggccggacatggtctctcttctcttgcttctgtgctgtaaacggctcctctgagcagttccttgagattcgtaagccaaaggcttttgttagattgtgaggcaaggtagagggcagggcgcaggtataccatttgtcacaacaagcttccttaccactcctgttttatttaaaactccgctcctgttttatttaaaaccaaaacactcaatccaccatgtgggatccttagtagcacacatctcaaaagcttgcactcattcagggttggaatgggcagtgaagcttatctaggcacatttcttcacagccctgtcatcggggttcaaattcgcaaatggcatgaactgcctagcaatagtgccactgtttttactgtagggctgtgacttgcctccacctaagggagtttcagtgatatgggcttagggaatacagggaaatagacttgtgcagagttgagaaaacctcagaattcaaattcgcatctcaatgaatcacgtacccgacttaaagtaaggtaaccattaaataggaatgcatatcttgccttcccaagctacttcctacatcaatgtaattatgcttcgtccatctttagatgagaggcaggcaatccatgttagatctactttaaaagaaaaaaagatgttggggttttctggagttactcaatttctccacaatgttttggcaccctaaatgccaagcatcgctgaatcaattgctaaatttcaaaaggcatgccctggcttcagatacattaattttctggaataacaagcagtccattttaatgaacataagatactatttccttcatcttaccactcataactgagcttaatgataaaatgtggggtggctcagaaccactggtgggcttcagtggttttctactcaagaacaatgtcaactacagaatgggggttagatacaaatccacagggtgtgcttgctattatcatgaagagcaaaaaagctcctccaggccccccaccatcatgccaacacactttgatctcacttccccttgtgaacgcttgagaggataagcctgtccctgtatatgaagccttagctgcagtgctggatatatttacgttaccctttgcaagcctaaaagaacaagatcaaaggaaaataagactggtgcccattagagaagccatttgagaacccataagtcatccataaaggagttatataatttaaaaacatacaagcacctactctgtcccagaccctgccccgcagtagccaacaatccactcagtgatacagacacagacatagatactggatatggcaattattctgttacttcagaaagaaaccatttcttcttaactaagccacaggcagtatatctacaaatgggtttagagttggcttgaaattgattctgactttgaaatgctggtaagggaataagtcatatctgtcaatgcttatccttccttcttataggaataatttttaaaaaatcattattctactggactattccaagggaaagttcatgagggtggtagactcctgggaatatttctcaatgttctagctcccatcttttgcttcaggtgaggtacaggccaaactgtggactgcaactaactcacaggaaagccatgggatgttttaaagtttccttggagaagtcgggtgtggtggctagcacctgtaatcccagcaatttgggaggctgaggcaggtgtatcacttggggtcacgagtttgagtccagcctggccaacatgatgaaatcccgtctctactaaaaatacaaaaattagccaggtgtggtggtgcacacctgtaataccagctactcgggaggctgaggcatgagaatcacttgaacccgggaggcggagcttgcagtgagcagggatcgtggcactgcactccagcctgggtgacagagtgagactctatctcaaaaaaaaaaaaaaaagtttccagagagtaacagcggcacgttcagattcagcatggactactactattatttgaaactactaacaaatggagctagtaggtatttctcttgttacaggggcactgtgaaaaagttcccagacacaaaagcaccatgaattgagaaagtccgggagctttaggaatctggagggaggaggctctctccatcagacttcaatgtcctcaagcaacaggcaaaagggcatccctgctctccaaggtcaccttgaagggagttgccatgactcagccttgtgttcgaccatgccttcctagggaaggcctgcagtgggtgtgcgtctgtgcagatccatcagcttaattaatcagtaaagaactttgctccccccattagtctgtgcttctcattggtagggcaccttcagtcaggaatctgtttgagtggagaagtaagggtttgggttgagcaaaatcccatcccaacccctatctcaactgagcagaacatcctatgaaagagacagggcaggtataattatctcagtttttgagatgagaaaactcaggtccatctgagtctaatgaggttaatggattttcccagagtctcaaagctactagagcagagctgtgccttgacccaagtcttccatgtctaaacctcctcgcgttataccacagctgcttagattttgagcaagaattagtgcccttccctgcttcaacacacacacgcagtggagaagcaagcagtcattcccctcaaggcaagaactgtcccatatcacaccctccccatacgggcttgtggaattacttggctcctggagctgccaggcagccctaaagcatccaaaggagagaagctgccacattgttaccctgctgaggcagctgggaggctgtctcaaagccagccttcacttcctcaaagcttagtccccgccctctagccctgcttctaccctaggtcatctctctcctctttgcaggaaaaatgtctgtggaggggttcaaggacctgcagggatgcagacccgtgattctctgacaggagcatgcgtcagatgtgccagggaaggtgtgttaaagcagaggtcgcagggcctgacccccagagttgccgagggtagggccaaagaatatgcatttctaacacattcccaggtgatgctgacgctgctggttcagggaccacactcggcgatccaccaacataaagtgacttgtctcttcccaggatctcacttattgctccacacagagcagagatacttattgagcaaacattaaggagggcatctcttgatcatctcaaaaaaaaaaaacgtttcaacaacttctatcatcagctctgttttggacccagtggtaaaagttaaagtccctgccttccaggaacgtgcaagctaaagatagacttaattcatgtagacatgcatagaaagataagactaccatattcagattataagaaatcccactgaataaaacaaaaggcttacaatagaaactgcaaaattccctgggaagtctccaaagtttgcactttttaattttcagtgataccatcatcatgccgtggatcactgtgcagatgttacaactgtatttaatcacaattctaaagccagattgggctgctccaacctaatggcatgtgagtccttgaactgccatcaaccggatctgacagcaggcatggctgcagcaggcagttacagaaatgggtttaaatgtgggtgactcttggtatcaaagaactgtgaactgttcagctaagcagaggaatcatcagaataatgatcatttttcactctaccccctctcccttgcttgttcaaagtaaaaaaaaaaaaagcccttaattgcttcttgaactacacacaagtgggccgttgactgtgactgtaattcagcatggagaagcaagggaaacactaaaaccgattttgttgcggtaatgccttaaacggagaaaacactgcagtgggatcagcaggcacaggacgctgttaagtagaatgatacctccttaaagcacggcttgagatattgtcagctgttaaagtaatatttaatcgtagatgataccaggtgtgatcaagggggaatatattaatacagggggtgtggtgggggcaaggaaagggtagtgaggggagaaagataaggagagagaacaaacaaatgattttagaaggacagcacattacgggtgccctaccggattcaggctcctaatgaagaagacatgtttaggggaactgaagaattgtggattcagtcatttgccatttaccttgaaagacacgtccagataaatgattacatcttcagaaacttgaagcgtttccttcattctcgactatgggtacctagatagggttatgaacgtgaaaggcagaaactgttttgcccatactgcccttccatccaaagccatgaccctctgtctaggtggcactggctacagggaacagaaaacagatgcctgcaactgagaagcctactgccaactacaagctgtttgtaaacacttctctccatgtttacctaagaaagatgcaggctttccaaggaaagcctccttttgaaaaatgtgcctttttatttctctgtgctgttaggtccctaaaataaaaactaatgcccataattctttataagtctcccatctcactccatccagaagcatctcttcttcccttagatgttttttcaactaccttacaaaggtagcgcttccatttctgtaccctcacatgcaggcctgccctcttgcctgaatattctacttcttctgtaccagcagagagtagggtgaaggcccaccacttttgtcttctgttctccgcatagtggctatgttacatcctcaatgacactgaactgtaaccttgcttgcaaaacaaacctcggtgaagagagcaagcactcttgtactggaaaaagcctgatacctacttcttagtgaagtaaccactggataataagaaaaaagtagctggtagtaattaacatctattaatacttactatgtgccaagtccacactaaaggctttatttttaaattaaaaacaatttttattttaagacggagtctcgctctccccaggctgcagtgcagtggtgcaatctcggttcactgcaacctctgcctctcaggttcaagtgattctcctgcctcagcttcctgagtagctgagattacaggcacgtgccaccacacctggctctgtgtgtgtgtgtgtgtgtgtgtgtgtgtgtgtgtgtgtgtgtagttttagtagaaatggggtttcaccatgttggccaggctggtctcgaacttctgacctcaagtgatccgcttgccttggcctcccaaagtgttgggattacaggcatgagctactgcacctggcccaaactaaaggctttaaacaggttctgccattcagtaccaacagtaactattctaggcagatactattatgatcctttcacagagaggaaaaccaatgctcagagaggataaggagattgcaaaagtcatagtaacagtggtaaagtcatgctttgaatccacatttctctgactttggtgtaaaagctcttatactctattaatggccagaaactgtaccacaaccagggcacagcctacacagggacaatttgaaggagggtatggctatctatctatctatctatccatccacccacccacccacctacctacctacctgcctacctatctcatggaatcaggggcttaaatgtctgccacatattggacaatgatctgattgttctaatatactatttctaaactttataacagctctacaaggtccactctttaatcctcatttaagaaataagaaaacccagagtccatatgaatgaataacttacctacctttccacaagtggtaggtacaagtgattaaatgactaagtccacatgcctcccactctgccttcttagcttcacgtgcccaaaactcccttactaaccaattacagacttattaccatcctcctcctaatttcccaaaagaaaaaaaaaagtactagctctaatctacgactattacaagaccatcctcttgcatatcttatctttgtgagcatcagaaatgatgccaccaattcatttagacagtgccttcaaattctcatataaaaggtacttactatttaaaaaatggaaatgtataacagtgatactattaatagatcaattaaggagatttaaatcacttatttcattgccagatcgtagacacagtactatactattcattgagtttataaagctttctccatgacataagcctgactttattcccctgatggcatgatatgctctctcactcttaaccagtcacagtcccactcccatcaccaagtatcgtgcaaggatttcaagggtctcttaatagtagctacgtcgactagttcatctcctactgatttacctactcagtttcagaggaattaggtaaaaaatgcataactccattggcattgttgaatttttttctaaactcttgtgatagggatggaaaaaaaggacagagatagagcatcagttagcaaatatttactgagaaggtataatgtgctctgctctgaggcactggatacccagcagaataacccttgcccttatccacaatgagctggctagggagttttacacgagctttacatttgctcgcctgggcactcttgggtggtggtggtgaagagctcgtgttttgaattagacctggtttgaaacctggttttgtggctttatttcctgtgcgaccatgagcaagttacttaagctcttaagggctcagtttctgtctttgtaatggagatcataatactcataataggatgggaagaagtagcaaatcctgtatataaagaggccagcatgtgcccagcacacagtaaggattatgggaatcaaggacctagcacacagttgaacagaagagagctggttcatgggagctgcttctcaggtagctcaggaagctgttgagttattcagagcttccctctcttatttattcagggcttcgcgctcttttccttggttgccaactccccacttccctacctccaaaccccatgcaaatttcacctggttaacctttattcatcctttagtctaatctaaacctccattcccttttcgtcctgaaattcccacctgatcacaaaagcacctaagcttacccatatctttgcacctgtcactcgcctttgagagttcctattttcttgcctataccccctgccagagtgagaaactagagggcaggaccatgtgtcagcactatgtccccagctcctggtacaataatggacagtagcaggtgttcaataatcatttgtttagaaggcgaatggatgaatgcaaatagataccatttccaaacctgcatagatctggccttaataaaaagggcatggctcaaatgcggcatcaaattctgctgccccatcttgtgcctggtatcattaaatctccagataagaaggaggaatggctgcagtgtcactttgaggcctttctaccatgacgtcagctgctcgtcctgcacacagtgggtatagagtacgttacatggcttagctggctctttcttaataagatcattgttgctagatatgggtgtgaatgtggatgcagttcagatgtttataccaacgactggcataaataaacgaggaaagaattcaggtcggcccaatcattagtaacagtatcttcttgctctcctgggagctgtttcagattttggcttcatcctcacccctacataaagagacaaggatgggattgcagcttctagaattacaaccattttgtcaacttgtcatttgactcactgtctggccggtgcctctccctctgggtccagagacattttgcacaggaagaaagcaataaagtgaagtcacagggccgacgaattctccaatcttcaaagtacctcgttctgccccacagtacatacatatttctggtaagcgccatggagagcctcacatctgttacctcctgcaccgctgggaatcaaagcatttatccccatgagatgttttctaaaggcctgagggcactgggccattttatcctccctcccttggagagagcttctctgactacatgaaaatacctgaaaaggctaactttgtctgttccttattgccttaaaaataagagtactcttaacctttagggatttatatttggaagagggaaatgaactagatacagcttataaaaaggcaggaaagtgagtcattttttaaattgtttacaagcttgggaccaaaaaatatacatatttgcagatctttgaatatacactggtcttatttccccgtgtatattattccttttctctactatctttatgcttttcaaagaaaactaagtggggccaggcatggtggctcacacctgtaatcccagcactttgggaggccgacgtgggtggatcacggggtcaggagatcgagaccatcctggctaacatggtgaaaccccatctctactaaaaattcaaaaaaattagccgggtgtggtggcgggcgcctgtagtcccagctactggggagagtgaggcagaaggatggcgtgaacctgggaggcagagcttgcagtgagccgagatcacgccaccgcactccagcctaggcaacagagcaagactctgtctcaaaaaaaaaaaaaaaagaaagaaagaaagctaagtggaacctatacagcaagtgctagacacctagttgattattcgaataactaggatttacaaccattaattagtaaaaattagccctgggaaataataataactagaattctagaaagctgggaaacagcccatatttagggtttcggctttactacttactaatcatttccaaaacatggggatactacacagtcacctcacaggtttactgtgacaatcatatgtaaaaataattttgtaaagtgctgtacttcttagtagtgacaggtctttctacagttgccccttaaatgacataggtttgactgccgaggtccacttacacacggcagtcaaccaaacgcagatcaaaaatacggtatttggccgggcgcagtggctcacacctgtaatcccagcactctgggaggccgcggcgggcgaatcacctgaggtcaggagttggagatcagcctggccaacatggtgaagccccgtctctactaacaatacaaaaattagctgggcatggtggtgggcacatgtaatcccagtgactcaggaggctgaggcaggagaattgcttgaacctgggagttggagattgcagtgagctgagatcacaccattgcactctagcctgggtgacaagagcaaaactccatctcaaacaaacaaacaaaaaaaccacatacacaataatacagtatttgcaggatgcaaaacctgcccctacagaggagtgacattttgtaaacgtgggttctgcagcaccaacttcatcacttgagtatgtgtggacaggcagtcgaagcaatccccatgaacaccgaaagatggctgcagttcttcattgggactgaaggagaaaggccaatggggttgctctttcacagaaagagttatatcaacatgtttttttagatgctaaatcatgtttataattaaattggttatttctttagatttcttttctctaggacattctaggattctaagagaagagataaaatacgaataattgatttgatctgtttaatactgagaaagaattggagagtgttgtcctcagtagaagcttagaaagcttctaaagaaggagaggctggatgaattccccaagatgacatactaaaaaatagaaccaggctgggatggaagggctcctgactcctccttcagtgctctatgctaaacaaaaccttccttttcgcctttccacatgaagcccacatctgagaccacaaaagcgtccctctcaaaaaggtgtggaattgttgtgaaagctgtgcctggaggacaagggctgcgcctgactgttcactgcaggattctttctcttgtgcctccacagtaggcaagcaggactgatgttccgttgtcccgaggctgacacggcttccctctcccagcctgaaagcatccaaatgggtcacactggcttcactaatagtgaccatgttattaaaattccaggcagaatccaaagtgcaagattaagattacaaaacgcctagttccggtagggatcagagaaaagaggagacccattcctttagatgatctgggccaagaggtagcagttccttcatacaaagccatctatacctatggactttttggaatggggtaattaattccttagtccctctgaatctgaggctgaaatctctccatgttcagaagcctaacatatttcacaaaatcctctggtgcaggaaaagcccaatttaaacagacccaaataaccccagaatacactgttgccgactccacatctgttgctgtgtttgttcatctggaaaggattctgtagttctcaggcactaaaggggaaaattaggaaagggaaaaaaaagccccctcagctcacacttccacccacttctccaagcaccttctcccttacggaaaattgctcttcccagaaaaaatcaaatagagtcagcctcttcaagcaaaacaaacagaagatggaatacgtaggcttctcttgtttatcaagtctaaaagcatgaggaaaacagagggagaacataaaaggaggggaaaaaaggagtcctttctggttggcttcagaataatatgaagaaagcacaaacaaaccctgagccactcatgcgcagaaagctctgtctccacccctttagggttgaaccaacatttaaggcccaagagttagctgggtaagaggttggtaagggacttcctaccatggagattattcccttacaggtaacgtgaagtgagagacataagaatattgaagggagctctctcacctcagactggctccaagaggggctatcgatgccactcccctaactcgaattttctgtcaagcctctcagagatggtgaacaaatcatttcctctctctgtttgagagtgctctcatctgtttggttctttgggaaagcacaagattcttctagatcccattaaccatgcttgatgagaagtccatctgcctggacattcacccaccatgtcaggaaaataaaaacctaggtagcaactgtacagattctaagtcaaaaaagatagagcaaattgcataccctctctaggaaaagcaaaccactgactttctgaggtcttttgtttaagcccaaagataattacaagagatggataatttatttgacctttttcagaggtacctaaatataggaaatagttaacactttcctgtgggacttgctatatcttcttagaagcgaaggaatatctctatgtatgtctctgtctcatttcctaaatttcaactattctattgccagtttgagttctcttggcagaatcttcaagtgttctcagtaacagatgcctggaggagagggatgctatgagttctgaaacagagcaatgcacagaaccggggaagcagctgctccgctctagtcactgtgtatacaacttcaccaaaagtgtttaggaaacagatcattctggaacctataccacctattcaaaattcaggccctttcagttctacccatcctttttttttttttttttctttcctatgctgtttgttttctgccatgagctttagcaatctgtttatgttgtgagtgtgtgtgtatttgtgtgtgtttccctctccagcctggctgaattatccccaagtgactcttaatcctcaaccataattcccagtgattgcactgacatgataacgggggagcccattttcctcccacccctcctcactccctccccccttgttgctaagctcagccaaggatgctctagggagctgttcatttaaaagaggaagttcacagcagggtcaccaggcttttaaacagagagagaggttgcccagggtaagaagagagctcaaagtcacaaaccctttcctttgtcctgtgaccccagcatgtggggacatcagtcccaagtcgtcactctttctgaggccactgacatccccacagcatacctggctgggcactgtgactagcagaggtctggactgggaatcagaaggccagcacctaccctgagctagctgtttcatggtgggaaagtgacctgcccactcttgccctcaatttccacaatcacaaaaatgggctggacagatctggctggatgatgaatcaagcggtacttctcacatttcactatgcacagtcatcatccgaagaccttgttataacagactcgtgggcccgcctgaaaaggttttaattcagtaggttggggccagggcctgaggatctgcatttctaacatgctccctggtgatgctgatgctgcaggtctgaggaccacactttgagaaccactgatccatggcccctttcactccttacatcccactgctctattcccaggatggcacaagagcagtcagaactatttggccctggtcatgtgaaaaattccccaaaggactacaaaagtcacaggcctctcccacacttaaatagttttgtttttccatgcccccagcatccactcacttatatgcaaagacaagcagcatagatatggagtgaggagaactactggcttaactttaagttgccaacagttgctacccctgggaggccacttgcagttataaaacagaaacaagttgaaatagcaaaataggaataagaatgaattatataggctcctcttgcctaggttgctatgctgggtcatagtttgtcaactgcacaagtcacctggaacagtgcaatgtaaatttggtagtctcacacattgtgtaaagaggtataaaaaataactccaaagcaataggaaaagaagtactatcatgcagaccttcagatatttaccttgttccccgctctataatccttttcaaactgcaaaaccagaaacctttctgccatttggcaatctgactatcatccatcaaatatttacaaattcctgcatacgtccatgatcacagagttatctggcctggtgcgaaagagcaaaagcactgggctggggatgctgggattatgtctgagaaggaattctggttctaagctcctgctttcagatgccaaagtattttgaccgatctgaaattctaattatttaactgcgatagtttatgctaaggcatagttgtaaatgagaacttaatgaactcagagtaatgtcactaggccagagttctcagcccctctacctgtttgaaaatctttgctatattgagtcactgctactaagaatattatatgcatcagaggaactaaaatcaaataaatattaagaaccactgcacagggacaaataaaattttgagtcaaaattttactctttaacttaaaatttgatttggccgctttagagattgccaaatggaatgggagccagataaggggtcctttcccaaaagttctaaaaaagttttttttttttctctaaatttcccaatagcttttaaaaaatctgtatttctttgaattgggggctagcaaactatggcccactgcctattttttttaaataaagttttattggaaaacagccaaactcatttgtttacgtattatctatggcacttctattgtacaacagcagagctgaggagttcctacaaaaagcatatgggcagggtgcggtggttcacgcctggaatctcaatgcttttgtaggccaaggcggaaggatggcttgagtccaggagtttgagaccagcttgggcaacacagcaagtcccatctctacaaaaaatttaaaaattggccagccatggcagtgtggcctgtagtcctagctactcaagaggctgaggtgggaggcttgcttgagcccaggattttgaggtcacagtgagctatgattgcacctgggtgacagaataagaccctgtctccaaaacaaaaacaaaacaaaacaaaaagtgagcatatgacttgcttaaaatatttactatctagccctacacagaaaaaatactggtttaaataacagaaaggaaataatgacaacacttacacttaaagatgtgatgtataacatgtatactccaaccaattaccagataaattaattacaaacctgttggatcaatcctgtcaagccaatgtcagaacccactcctttttcctggctctcagcagtgtcttcaaatgcaaagtcataatgctttgaaattcactcagctgttttaacaaacttttgagagcctattctattcaaagtgctaaaatcaatttaagtactgaaaatttatacatacccatatccaccaaaaactaaaagcagagccatactaatcacgaatttctgcatgtgatttcagtcatataaaaacaacatatgaggaaggggacaaatgaggtcttgagaagccataagtctgcagttggcagataaaatgccatctcagataatcacattcaattgtcactaatgttaatatatgttgctaacagtcgagcttgcacaccagaggttagctttactgcccatgtgcagatgtttgcaatactgaatctctgccataaccctgtgggaatggcattttttatgtgttctgcagtgaatttatggccagggagccataaatgttatagttctttaaaccttttgcttttggagattgtcacagtgcttgaaaagtagagagacacagatgtcttctgttagcaagtcatttctcgatgtgctcagggatacggcctacgccagctcctaaagttccagtcatctgtgttatcaatgctacacagtttgaaaccccactcttgacttggttcaattcggatctacagagggttatcaaggcctgaatgtgccaggtgctgggctaggctctgagacaaggcccttgacctcaaggcactcacatgttggccagagtgacaggtcatctatgaaatatgacatggttagtgtcaaaacagagctcgagaacagacccatcagagagggcgaaatgacaacctgtggaagtctgctcgcaggagaggccatatgcctgtacaaagtcttgaagggccagtgcaagatatgtaagcaaagaaaagtgtgtgcatgtgtgtgtctctgtgtttgtgtttgcctctaagtgtgtgtgcatgtgttgttcatgcaagaaaaactgcacaaagccacagctgcaagaaacgggatgatttgttccagaatgcacatgtagtttggtactaaagaagcaaaaagcggtgggggatggggcgacaggagacatacagctgtagagactggaaagactgtgggcttagcagagaggtaggcagatcttgattcaaattctggctctatcacctacaggtagtgtaacctcaagtaacttgccaaatcccataaacctcatgtcctcatcagtaaacagaacctcagaggattaatacgaaggtgaagggaggcatggctgggtctgagagcaaaatgggctagtaaactagtaaactaacaacgaagccaccagggaagaaaaacactcattctgtacagcaagaaaaggtcttccattttctttaaaaaattctatctaaagtctcctccatcatcactgaataatgatggaagaagccatttaaaagaggaactgaaaagcacagccaaacctctaaaatctcccaatcacccatgtcatcaccatgcaggtgagaaacactgctagggagactgtgaatcacaaatacgattgacactgttcaaaacggtagcctcctaaacatctgccccagtgtctacacccaacaccagctctgtttgctacatgtgcccccagaaccattgggagtgtaaaacagaccccctgaagtaacacaaaacccacttctgacataccaggagccatacaacacatgcaaagtttctttcaagataaatgaatcagcacctcaagcataacaaaaggaatgaattttctgttaactgggcttttccagtttctcttagagataataaaaagctcccagtgaatatgagtaaatccccctactgtagaaaaaagtccaagataagtggccacccttcctcaaagcctgccttagttttatgtgagagggaattccacagaagaacagagaccttgctaacttgggaaaacatcctgtttctcacagatgtagctttgttcattgctttttcttgcatgaacaatacacatatacacatgtgcacatacatgcacacaaacatgcatatatatacacagaaaatggctgagacctgcatggctgagacctgcatctttcaggaacttggtgcaaggtgaaaaggatgcctttcacttgcttgaatacacaggccatccttggagatcacttctaaaaggtctctagacagaagatcctgaacccagaaaggcagtcctggtgtagccccaaatgaaaaagatcaccttgatcaagaaattctcctttaaaggtttcagagccacatttttgtgtgcgtggtggagaacagacctatccagctgcagcaaaaaccatcaccgtaggctctgaagtcctgggattggtttcctgagttcctctgtagcccaccgagcagtgacaagcagcaggctccaaggatgccctgacctcatcaagctgttggcaaatacagctttccaaagatggagggtagaacattcccaattaccaggccaatgaccattctgagggtagataaaactaagcaaatgaatcatccaagggcaacctttaactataagacctgggggctggaattcactctatctctagcccccacttcaactttcaaagcaccaaatggggcaagcccagggtttttgcccagaagacttttccttcagagacatttctccattcgtaatattcagtaagcagagaaggatgcaagagtttttctctagagtggggtaaagtgaggatagtgcctgtctaggaaccctggtctgggttctgaggatcaaccatttcaccaattcctgggtcaggctgcatgaatcactttcaagaccttgtattttttattctgtttactaagagatctgaatcaactagatgatcccaaagctaccttccagttctcagttttatgattctaagtgaaaataacccaaatcaaggtgcccctctgtgaatatgaatgaggcagttgccaacacactgtcatttgggggctctaaaaaaagaaataccccagcctctattggagatccctgagaatcttgccacctagtgattcttggatcaagcattaaggctgctaaaatgtactcattgtgtaatttgggaatgcttgcccattaactcattatcggccatttagtcacccatgtaaagaaagctatacaataaagtcagccaaaggttatgtaatttttgttgaggcagaacaggtcttaaatctctagcccagggagatgacagcagccaaaatccatctatactgaaatgattatggagctctagacaagatgagacaagagacaagctgtttagttaatgagaatcccaaatctctcccggtgaaacaggaatcagtggtctccagctaccatgtcacacagccacactcattgtgatctgccactgttattcacccctgcctgatagcttttgtcacccccaaaacgccccccaaaattcaccacctcgacacacgcagtcatttatgagtctcagaagagctgaaaacagtgtctgaaaacctcatgatctcactctgtccctgctaatacctaaaacagtccactgttccatttacacaggcttttcttcagcagatttacaaggtaacatctgcttcggaaacagatgtttatgccagaattctcttctgctcattaatgcttttccggttaacatctaactatctcactcattagttcttaataatactttttgtatccgagccatgccaaatacgcactctttagagctctgcattattgttgcttctgttgccgttgaattacgctgctgaataaaggaaaagtaaaaataagcccctctaagaaggctgctatgtgtcagagctctatctttgtgaactgaacaagctgaaatcaattaaaagtgtgtgtttagagaatgcatctcagctgtctaattgcaccacctctgctttagggccaaagtttgactccctgccaaattgccatcaaaatgggcgtccgtaagcgctgctgtactccctccgccactgcctgggcctgatggaagcacttgtgtaacgaaggaagcccagtgcaccccagggcttggcacacacactcccacttcccaggggcaatcctcagctgtggggctccggcagaagatgccatgaaacctctgggatgaaggtcctgggactagataaattattccacccgacttcctcagtcagccagccttaatagattgactacaggaagcattcgcatgatgctctttatttatccacaagcaacttcacataacaagaattaattcaggaaaggtagactcgacatacctttgctgagtgcctagtagtgcgttgggctgctaagtattttatacccatccattattagaaatgtaagtactgcttgtgtgtattcataggcaagggaaaagataaagtaaggttcattttttcctgatttgttcctacaagggtatatgttaaagtggtcttttaaacttgtttctacaatggcatatgttaaaaatggtctttaaacactttgaaacacttgatggtggcccccaagactagcttttatgtttccagaagccaacaccgtagtcaaacaattgaacaaaccaagatataaataaagctaaagttggtctatgcaataatggaaaagccagtcctctagggaacttgggccaacacaatgtattgtttgggatcaggagaaaggatgcttaataaatcatcaacaatagtttccatggttacaataaaatgtatagtcacctatattgtttagttttataaccattcttacagggaagaaataacgaagggtgctggtgataagcaaatatgaaactcacttaaaggctggcagtatgttcaaaaaaatgtgaaataaaactgaaactaagtctaatcaaggaaacttctagtttttaggtctctcggtaaccaacatttcttggtcccaatgaacgacattgcagctccataatctgctctgttctttttatagtaggttcttccctttctgcctaagtggctgcttttcagcaaaattacttggcaaacaccactttatcaagtataaatcagatatgctactctggaatctaaacccacaaagaatatgccccataacactacatgaaaatgaaaaggagaaacactgcattcttgctgccaaaagaaatgtaaaaatatgaatgaaaatgattgctgggtgtgccttccatgagattccatttaaacaacattccccatttacttacatctctacaatctgatgggcttacatattgcaaaatgaaataaaagcacattttatgaggaaattaaaatgttatgaactgccctgggtggtgttggcattatacacagaatggtgagtcctaaccacagtcaaaaccttgttcccctccagtcaacagatatcatctgaggctttgaagcaagtgctaagggaattcaagctggagatttaggggctctccacagtgcctctctccagataaactccaggggattccagggtgacagagtaggtgaatgctgaagtaggtataaataaagtatgacattgcacctcccagccctcttgtttaaacactccccacttccagatctactctgctgcttcttcctctatctgctgtcaatactgctgcctcgttctcctggacttctgaagtgtttccttagatcctctagttagactgatggctaatacctatctcatgtgactgcagtcacagtatttactcatttattccacaaagagataaggaaacaaaaaaaggtaatattcttccatctttaagagttttcttaaatcccaactagaaagataaacttcctttcctattactgtgttcctaccaatatgaacgcattaggtgccacaagagaccatgctagacccaaagtttccctaagacagagctcaagggcttgcactaagcaggtgtcaggtgtgggtctgccaagggcaccagccaaacaaatgatataggcatgaggccacatggtggactatctgggcattatcccagatcctatgcctggagatacagaccaacaatgctgcggctacagagctggtgactttctcatccctgtactcagaagttacttcggtcacaggggacatgcagaaaaccatgcaggagagtaatctataccccgatatggtagtaactaaagatgatgggtcaacaataagtaagcatgctcatctggacttctatagaattgctctttgcttgaggaaagcacctttcacatcaaccctttggaagtggtggtgtggcaaagctgttctcatgacccataactcgatggccacctctgaagctaatcaactgagaaggtgaaaaaggagcaggcacattttctcttgttccacaaggtctacaagtagttgttacccactgacagagtttccagaactccatgaaacggggtttgggcaggcacatactgaacgaaaaggaaacaatgtctgccatgtcaatgacctaaagaagacagagatgacctcaggtgaggattacaaacttctctgcttccgtcgccaagtccttcaaggcacgtgatggccagagatattttccaaggttcaacatggcctagggctttgtctcagttgtaggacttaggcacaggagagagcctcatgctggtgaacctggcaggtcaagatgttgatattcattagaaagacttagccttttctcctaagcatagagcatcaggaggtatccattcctggggtaactactcctttatgtgagtgaacaaaaataatgagatttccatagattccaaggagatatcagaatagtcagaagtcttgcccccagaaagacctatagatttaagaggcagagattcaccttccagttttaggaaggaagatctaggccattaaattgaccttggaatggtatttttccttacccattctaagtaatcaaatatgaccgtatgatctaatcaagcagatccaggtagtaggtatctcagctgttgctgtctggtgtgttttaagagacaccagtacagagctcagccctgctccagccgtaggcgatgcccatccaatgaatatagaacacaccatgggaaagagtttcatcagcattggtcccacttctctcaaacaagatgtggtaaggtccaaaaaatgcacccagcatgtcttatgctcattgttctgtggggaagacaaaattgagaaggaattagttatttccagcacagataggaaagatcaggaaggaaatagaaaacattatttgagccactactgggtatccagggctgagccagatgctggagatacaatcacaaagaagacccagttactgcccttcaggggcttggtgcacccagcagacaactacttgcagcaaaccttaggtagaagaacaacagatacatgggcatatgcctcagcaatgagaaagaggcgttcctctgcctgaggaagaattcagaaaagatgctactggagcgggtttcaccaggcagagaaaaggggaagaggattccaggaaaaaagcactgcatcttcttgagagcccatagtctttctgcatcaacctggtttcttcagtgttcaggacagtgcctggaatatcatggggactcaataaaggttactggatgaatcagagaattcagggcatggatgaacagaatgtcctttgggtgtaaaggtgtaaagctgtaatcagggaaggccctggtcagtccttggttttgaaagatttttttggtgttctggaggctgagctggcttgcccagggataagctagaatgctcaggtgggcggctgctgcaatgctctgaagggtatatgccgagatgatcatagggggtagtttttagaagtattttagatacttacagtaggaatttatttaccaaaaatatattttttaaaatacctatcttttaaaaaagacaatgccttttaaaaggcttatttcctggaaagaaagagcttttaataatatgtactaataattgtaaaggaagttacatacaaaaccaataaagaaaagactgcattcaactaaacaaggttaatgcctacccatctgaggaatcttggctactttgtaaatatcaactcagtctgcgggctgggccctggtgacaaatgctttctccaatcttatggagaatgaggttgtgcaaggacacaaaatctaaaagtatataaactagaggttttgagcactttttaaaaagcagcagaaccctttgcttaagcaaaatcttatgcagaatcctataggcaaatcagattacaaataaggatgcttgttcgaggtggagtgctggggactggaggaccccaaggtccatgattttccatcacctcctggccttttgaggcagcccatacaggccctgaacaaacacccaggggccccttgggacacaaactactttctaaaagtcaggacaacttccaaactggcccatcttttctactaaaggcctggtcctcagaatgatgagatggcccctgaaggatctggactgctacttcctgctgcttatttgatcattgatagggggtttggaattatgaatcacaagccaaagggcagagtccaaaagcttgtctgcaagtggaagaagtgagaggagcaggagattggctcttcttggtgaatcccagagctgaggctttgcagatgaggaaggcaagaccccatgcggacagcaccttaccaggcccacacccacattgggggagtgtgaggcagagccaggtgtgaaggctcctgaagtttcttctaggtggctttggggaatggctgtgtacactactgtcccttatagagctgcagccttctcggaatcgggtacatgctttatccagtgtgctctggtataagttcacaagcagtgcagcatggggcaaatccaatgacattttgttccttcccagagactgataagctcatttagtagcgacaattcacagtccaaaagaaaatgctgaatctcacttacagacatagtaaaattcaggcaaagacagccagatagcactggaagctattttagacatgcatacatattttaataccataaatctttatttttcttaacaaaatagtccacaagattatctgttacaaccaagtccccatgagagaggttataatccccatttcagagatggggaaactgacttgtccaagcttccagggatgagacaagagctggatcttccttgcacacagctgcccgtggagctcacacaaagagcttccacagtcagcaaaatgtaggctcctagtgcctagggaaggcagctcagagtcattaaaaaccggtcctgtcccatcccaaaaggacatctggataaatacacactggggagccattttgtgagtgttcgtgatacatttcccatcgtgccctcagatcagcttctctctggtgcagcgctttgggaaacacttctctgctagcctgatatacagatttgagttatttcaaatcgataaatatttactgggcatcgcccatgtagaaggcacatgtgcatggcaatggatacaaaaaataaaaaatagtgagtaacacaaggtcttggcatccagaggctcttactctactaagggtgaacaacatgaagaattttaaaacaaggcagaatgtgagaagtactacaaagaggaaaaagcaaacaagagggggagtgtttccgatggggcagactgtggaagagcttgtggaggaagcaggatttgagcagggtccagaaagtcgggaaagactgactcgcaaataaacaggagtgaaaggagggaggagcctgtcttgactggtctgctttccagcacattgggctggttaaatatctaaattgtaataggctttctgcatgcaaaataaataaaaggaattgctacatacctggaatttgctgcaaactttccccaggatttaccaaggtcccacattttctggccttgcctctttctctgacctcagttctgtcatccctctcctccctcccttcacagtagccaccctgttctccaagggggctccaggactttctgcttgtcatcttccctctgcctggaaggtaaactccatcagagcagggacttttgtgttacttacaattttatcctcagtacctggcacagagtaggagttcaattagtatctttggaataaataagtggataaaataaagttctcaagtacagtacaaaggaggtgacaaatgtagaatttcttcttggataatttctctggctgtttttaatttttaaaatacatctatctgggctgtaaatcgtgacttcacctgccctaaaccacaaggactaactagtgttaattaagtctgatacaccattactcttcattcccaatgtaccattgcagcttttgaatacaggatcatttcagtctgcacaagaatgcttggccttttaattccaacttcacagttgagaaaactgatactcaaggcaaagaatcttctcagtagtcagagtcaataactgcaggaactaagactggaacccaagttttctgcctggtatgttgggcctagaagggaactgctattcctatctctccatctttccttccatctttccttccttccttccttccttaatccttccttccttccctccttctccccctccttcctccttccctccctccctccttccttctctccctccctccctccttctttccctccctcccttccttcctttcccccttccctgcctccctccctgtctccttccttccttcttccctccctccttccttccctctctcccttttctccctcccccctttttttctccctcccttcttccctccttccctgcctccctcactgtctccctccctctctgtctccctccttcctttcttcattccttcttttctacttttttaagaaacaaggtctggctttgtcacccaggctggagtgcagtggcgtgatcacagctcactacagcctcaaaatcctgagctcaagtgacctcccactcctgcctcctgagtaactaagcctacaggcacatgccatcatgcccagctaatattttgtattttttgtagagacaggagtctcactatgttgcccaggctagtctcgagctcctgggttcaagcagtccttccgacttggcctcctcaaatgctagggttaaaggtgtgcacacccagcctgctactcctattcttaacatcaagctgtaaagggcttccatgtatcgacaagggaatgtggtgtgatctgaggaaaatctcaccctacaaacaggaaatattaagcaagttttgacagttactcctcctttgctttgctttaaagtgaacttaactcctcttgattactgttattggaatgtctaaacttaaaaataataagtactgcttaggagcaatcgttattttaactgtgtgaattaagagcataagtcttttgtttaaaattctcttgcgtgttctactgaatacttccaaaggttccgggctgtaattcccttgcaggcaacgtacgcttcagtgaaatttttcatttgcaaattaggttcgtttacggcagaaaatgaaaagtcatcatcagacagaccaagaaatggggccaatctttacctagaaggagtaattagctgaaatatctgtggggaaatttttatctttcacgtattgtcaattttacaaaggtatgaaagaatcactctaaaaacctcaagaacatatctaattacggtttaccccagtgactgttcataactgactgtttactcagattggaatgggaattgcagacattccttggatgagaccacactccacaatatggaattcagtaatgaggttccggttcacaacctcccagtgcaaagtttgggcaaggtttagatggttctgtagatgtcagttctaattatctcctaaaggacagtctatactgtcccccactaaatccccagtgagggaagggaaacctttccttggaacattacctccctatttatttaattttctagataaatcaggaaagatacaaggagaatggaaaggtaagctcacacatcacaggcatccttgacagtagtgggacattagactgctgaccagacacaggttggtggttatctataaaacgttacttattacttcaaaaccaacacacgcaacgcatacctcctaccgaaaaaacaagctcttttcatcacaattgtgtaccatgttcagctctggccatttttatttccagcaagttggattcattccatttttaatggcaactccttgaggaaacgctctttttaaacctgtgttttgagaaatgaagttaatgggccagaactggtttatcatgaaatactcatcaagtcaggaaacaaagttcaaatccttctacccttaggtgaatgaaattcgtttgtaggacactcctggagtaactatctaaaggtcatctttctagttagtgaagacagttctaaaatagtaaacttgggttcactgctattaccttttgtcaaacttaatttaaaaagaaggaaacaagtctgatactaaatctaataaagtagtcaatcatcttaaattataggaatagaattcaaaagagccagaaattgtctcctttcctctccccaccaacatctgggaatgaatggtcaattttcttttttttttttttttttttcttttgagatggagtctcactctgtcacccaggctggagtgcagtgacacgatctcggctcactgcagcctccgcctccgggttccagcgattctcctgcctcagcctcctgggtagctgggattacaggcacgtgtcaccaggtccagctaattttttgtatttttagtagagatggggttttgccatgttggccaggctggtcttgaactcctgacctcagatgatctaccctctttggcctcccaaagtacgaggattacaggcatgaccagcggtgcccggcctgagcggtcaatttttaaagtgttctcctaatttatcagagcattttgcaaagctggaagaacaggctgtacatggaagaagcagaacagtgtgcccttctccacttcagggctccagggctatctgtggctagagaggtctcactgtgttgtccaggggtgtctgtggctagaaatcttcagagccacctgtggctagagagctgggaccattcatttggcatggggctgcactccccctaatggaaaggggccatgacacattcccgtggctctggttttcagtattctttatcagccatcacattatctatcaccagcacatgccctcagttacaattaactagagcacggcttatcttacactccttacagtttaggctaatgtctttctgagatttgggaatggttaatcacatccccggtatgttgattcttaccagctttaatttcagaaaattatactacctggaacaccagcatgagaaactatgtactcagaccaccctgtatataactctgttgtaacacttattctactgtgtggattgatagtttatgactgtctctttcaccagaatctccttgaagatagataatgtgccttagcttgcacatattaactgctcatcagatgcttgtagagagaacaaattaagttaacagtgactagctgctgaaattcttctccatgaaagtacagagtcacagcaacctgttacaaatcactcattcattcactgttctagtcaaccaacatttaaaatatacggaagacatccagatgaacaaaacagacatggcccctcctcttagggtagggacggttaatagagaagacagacaatgaacaagtaatcacataaatgaatatccagttggaaattgtaacaaagtaaatggaagcaaagtagggtcatgagagactgaaaaaaaggcttgtttattttgagactggaaggatcagtaggggtcagctgtggagagaataagataaaaatttcgaggcactgggaacaagatgtgcaagggccccgaggtagggaagagcatgatacattcacgaaactgatagatcagtatggctagaattcagcagcaggaagggtaaactggaatgatcctagaaattgaatctctctaaaatcgaatctccccttcttttctctgagtatccttcctttaaaataagaaaataacgtcacacaaggccttgtaaacctggtaaagggcttttaattttgtcctcaggggaaaagaaagcctttcaagcaggagagtgacagaaccagatgtgcatttccgaaaggacattctccctgctgtgtgtggtggaggaaaaggaggtggacagcagagggcaaaagtgggagatggtacagagggccactgggagtcagggtcaggacctggaccgggtggggacagcagacaggtttgctatgaatgctggaagtaattctcagggtcttggtgatagaatccatatgagacagaggtgcaatgtgtgcctgggtttgtgtgtgctcggagctaacctggaatacctagcctgcccagctcccaaaccatctcccaaggcacacagggaaggcggggctttggttaagaacacaccctaacaaaccccaggtcatcccccggatcctagttctggcacaagctacacatacatttctcccagccctcagcacaaggttctgcaccccggcccgtgtcattgccccactgaggaaagtggatgcttgagagaatctgtgctttcctccttgtcagcagttgtcagcagggtgcagacacccactcttggggtctccatatgagaagccccccctcaacccgactgacttgacaagctcaggggtgccaatgagtggactacaaaacgtcacacaggcagtgaaatctaatgtctctgtctcttccttgagtggcctataaacatccctcccttaaaagaacaaaagaaaagccctgcttcccattgtgagttctggccttggctgccccaactgtcagagccacagctgaggacctctggcctcccaagcctttcgtttttgctctgtattccctctgctccaggcccctgacatccaaagctcttcttaaaacatcctttgatatccaatttccttttgatatggcccctactgtcaaaagcacatttttgttttcttgctggagaactgatccaaattcctcttctgtgtacccacaacttcctggttctgctcatggatccccgggctggtgcgcttaatcctcacaatcactcaacctgctcttttccagggatgcctcctacactgaagcatgcacctagtttttctttctttaacatacaacattctaatctagcttttcttgcttgacccttcttttccctacatgacagcgtgttacacattcagattcctcccagttaatagactggatgcttttttaaagaggaccaacagaggcttttccaagccccagcaagaaactccagtactttgtttaagaatcattctgtattttgaatatgaatgtctcttaattttgaatgcccagtgaggttaaagatagacaaaaattattgagtgcctactatatgcttggcagggagatatctgtttaataaatgtctttattcagacacgttcctatctcccgtattccctaactcctttcacttattttaggtgggtaactcaagcgcagtgtgctctggagtatgagagaaagcaatgttgtaagcaaccatggagaaggcatggtgagatgtgggctgccctcctctcctgggcggggctgaggaacttggcagtggaggatgggctgtgagcatcagcaggctgctttggggcaggcaggagggagccttcaccatgactgcatgggtaaccagtccccagacaattaagagttaactggataaatttagggttatccaggacctcattgctcctactactcctttgattccggtaaactcagtgtaatgacttccactttccagaaataatccatggggttaagaactttctccaagaactcacagggagggtggggtgccccctgcagcagaaccctccccacatggagctgactttgcagcccaccaccaacacacacaccatgaccttgtccctggtgcccacagagtgtctggctccattaccactaaggaggctctgcctgccactgctaggagacctcaacgactcaaagtcagagtgtgcacacgtttggggctccattctaattctcagggcattcacactgtcctggcaactcacccccagaacagatccagatatggcagccagcagataaagacctttatgtgtgggcaacaccaggatcatttgcatgtaggaaagaggccatcccccaccccgtccatttacacaggcagaatgtgccctgccacttggacctaaaaagacctcggcaagcaccacaaggtttatgaaaccaaagagaaccagcaacaaactcactgaatcagagggaagtagcaggggcttcttcccctcccctgatgttcacacttggccaatttgtttaatttccttggcaactatggacacgctaaactcacaaaagttaattctctgagagaagaaagatgaatcttagataaacaaggctgcatttggggaggtgggaaaagccacatgatgcatgttctcatctccccttccacccaactcacctgtcatcttcctgtgcttcctcattgcaaaaccagcattcctctcacggtcagctatgcacaaaatatccttctgttctcctggtcacatcaaagcaccttcacgctatgcagacaggtcattgagggaacggagaaaattaacaaacgcacctaggttatttctattaaaattagcccctcagccggtaggctctgtcagtttccattgaacacaaactctgacaagtctgttgaaaacttttaacctttccaggttgtgtcaacagcttgcaaacacaacaggaggatggtgcctctgagttctgcctttccttttggaatagaggaggtatcagaatttgttaccaccagctttcatgtttatcttcactgctctgctcactccccgctgccacttaaggagcatacaaacaccttactggataaagacaaacatctgtcaattgtctataaggtcctgatgagatttagcttttgcctacttctcccctcatgttttagcccactctcccccactctctactcagctccactgaaggctaccttatggaattcttcaaaaaagcaggtagagttcctcctgccacagggtctttgcatatcctgttccttagcatggagccctcttcttacctagtgatatggtttggctgtgtcccacccaaatctcatcttgaattatagctcccataattcccacatactgtgggagggacccattgggaggtaattgaatcatggaggcagtttcccccatactgaaccatctgatggttttataaggggaaatccctttcacttggtcctcactctctcttgtctgctgccatgtaagatgtgcctttcgttttctgccatgatcatgaggcgccccccccaccgcccagccacgtggaactctgagtccattaaacctctttttctttataaattacccagtcttgggtatgtctttgtcagcagcatgaaagtggactaatacagctagttaacccttactcatctcttgggatctcaactcaaaagtaactttctcaggagagggatggtctaaaatttatactctcacagaccttttacatttataatgaagcatgttccatacttgggtattatatatagtatttatgaaattatttatctaaggtctgtttgcccactagaataaaagtttcatgagagcaggaagaatgtgtgatttgttccaacacggaacatgatatatactcactaagtgtgtttaattattagattaattaataattttatcatgtcatacctctagttaaacattttccagtggttcccatgatatttcataaagtctgaagtcttccaaaaccatctgtaatggaatctcacccaatcataggaattcaagattatttattattaatcccctcaaaggtactctcctcttctgccaaggtcattggttgactgtgcctcaacgattgcccctcatctaaaatagcttcttttatctcccctctgattattcaaatctagtaatgcatgaaaatgcaggggcatgtggacaccataacacaatgtaaggaatgcagctctagctcagagtcctaggttcaaattcatctatcatgacatattatgtgaccttgaccaagccacttacatgctctgagcttctctcttttaaaagaacaaaagtgatatctacaaggctactgcggaagttaaagcacatggtagatactaggtaattattagctccacttccattcttcaggtgagaccatcaaaaacctatatggtgaaaagttgacataatggagaagcagcatggaccaagttcatctacaaaattagttgccaggaaaacacaggtttatcttcataagctggcaaggagattctcaaaagtggtatatgggttcattcccactggtgtcaggcagaccctggaggtaggtctgctcttcctggtagcaaagcaatctatggtcacaatgatttgtttcttaaagggccctaaagaaacactagttctcatcaaagtttagcatcctgtgtctttgaccatcttgttcaatgagaaagagtttaggcagcatctgctacatgttcaacattctagttattactagagaggatgaaaaatattacacatgggcctttcccacaaggtattaatagtatagccagacaggaaagaattgccttgatgaggtgagaccatacagaattgagttttaattgtgtgctatagactaagttcagaggagaaaaagcaatcaaaataattactcattcatttaataaccatccgttaagtatttaccaaacacaggacaatgaactaaaaaactaaaacacaaccagctttttaggagcttgtaactctctccacctgtgatcccctttgttccatccatccaaatcctactcacccatgaaggccttggtcaaatcacacaacccccatgaagccttccttaaccattctggaccagctccccctcctcccatctatacttctcaaacattgtctatttttcacactgattttaccactcacctcacatttgcatggcctgtgctgtcaaatacagtcatctctacttgcataactctcatttcactttttttctcagtatatacatctttccatctatttataaaccctgggaggccaagggcccttgaatcttctgccgcaggtttaacacaaatgcatttttatttgaattaaagtaggtcttcctacgagcagttcaaagtagaaagaggggataaggatggaaagtgccctttatggaacacgtgctatgtgctgggtccttccctcaggcctatttaaatccttataatcctagaagaaggtactgagtcttcttggaatccttcctctcctcctacacacatcatcctgaacatggtcactgagcagccagcatctgcccaccttggccctggctacattcattgctggagtgggagtatatttaactgtttccaaaagcagggaggtaattacttgctgtatccaatgagctggaatcacccgtgctctgcttgtttctaatacgcccatcaaccaaagctaaacacacaggagaccaccattagaaaacgcaggctctttttgcatgactgcctatttgaacaaactcacaaaggtcttaaatccaagtaagaccatctaagaatgcaaaagtttaaaaatgataggtggcagttttgccaggatgtacgaaactgcagtactttttttatttttaaaggaagtccactattctccatttcccaaaaagttctttgttcttttgctctaacaaagtaaattattcctcaccttgggcaagttggtaggaacgtgagaaaattacattaaatcagacatccttgagatcaaaatagattggaacaggggttctctttgtttaaaatagatcttcaaagagaaagcaaaagagcttaagggaagaaaaagttgtcaaacaacctcaagcactctggaagcacctaagatctacaaactattgatatgttaattaaaatttacttttatctagtataggtgtttgctggtcatggtctcattaccctgtggctcttttggcccttgaataaaatttcatttcttgaaagacattagaaaatgcttctttttctctctttcagatggtttcctctcccttattgcaatttaacaagacttcactctggcttaaacctggacaccgaatcccagagagaatacactatccattcactccatccaccagtaaccttctgaccagatcaaaaacaagccatattggacaagatacagaaaaagtagaaaattttaatcagtgagtaattaataactctgtattgaccagttgccagagtaggacttctccggattttaaaatgtctagagaaagaaaatcctgttcagcgataacccttctatttcaattctgcaaagccctcactgctgaaaattccttcagggcccaatacaaatgtccatgggatagtttatctcctctggttctattccagagaagatgtcccttccaggttcttgaaatttcttccttaagtgatccctagtaccgatcctgatcttgaaccagtcagaaaataaggtcatgcaaaatagtaaacttaaaccatcagaagtcaaattcagattcttaagtgtctaaggagtcttgtgactttgcagtgagccaatgattttttttaatattagttcatgttttcttttaaaaagctgatcccctgcacaatgttactgctaacagaatttttactttcttccggaacagaggttggcaaactgacctgtgggctgaatgcctgtttatataaataaaactttattggaaacacagctataccgatttgttgacatattatctatggctgctttcttcttacagcagcaggcagagttgagtagttgtaagaaagaccacattgcctgcaaatcctaaaacatttactgtatggccatttacggaaacgtctgtagacctttgctactactaaaccattaccactaaaatgcacagtatcaaaattactactctaaggtttgaggaaaacatgctggctatcttaaaacctaaagccaatttttattgtatgattaattcaacagtggtcattctggagaccttcaaagaacgataatcaccttttatgatctaatttgccatcaccatctacaaaccctgttttgctatctcatttgacacaccctaccaaaaaattaggaatgtgccaatactgtctgtaaaaagcactaaccagcagcaccatatgatgataacaggtcaggcaccgtggctcacacctgtaatcccagcgctttgggaggccaaggcaggcagatcatgaggtcaggagactgagacttcctggccaacatggtaaaactctgtctctactaaaagtgcaaaaattaactgggtgtggtggtgcacgcctgtaatcccatctacttgggaggctgaggcacgagaatagcttgaacccaggaggcagaggttgcagtgagcctagatcgcgccactacactccagcctggtgacagagcaagacttcctctcaaaaaaataaataatattaaccagtaccataagcactgtgctaagcatgttacgtgtattgtcatgtgagcaagatgtaagatacacaagggtagggttttgtctgtttggtttactattgagtccttggaacttagaacagtggctagcacattgtagccactcaacaaaaatttgataaatgaatgaaagttctcccataaaggccacgggatttatcctggtactggcaaagtgacacgcagagatttgaaaccaggtggtttcagtcaacacctcactgcctctgttatcacatggttcagccagcacaccctcatccagcccatcttgttttcaattaaataaacaccctttggcaatggaataactaaatctaacctgattaaatagtaagcatttattgggagttgatttacttagcactgtattagaaactacaaacctaaaaagaaatctaagatgcttttgcctgtggcacatgcagaatagtacgcttgttaaaagcatgcgctctgaaacactgcctaatgttcacatcctaactccattatttccttgctatgttaccttggcaagttatttaccttcccagtgcctcagtttccccatctgtaaatgggtgtgattatagtatctgagagcttgatccacaataacagtgcctatggcattctaagtactaatatgtacctgtgagtgatttgttattacagtcatgtgtcccataaagacattttggtcaataagggaccaaatatgacagcggtcccacaggattataatgaaactaacaaattcctattgcctagtgatgtagccatcaaaatgtcttatggcaatgagttaatcacacatttgtggtgatgctggtgtaaacaaacctactgcactgccagttgtataagagtacacacagactggccaggcatggtggctcacgcctgtaatcccaccactttgggaggccaaggtgggcggatcacgaggtcaagagatcatgaccatcctggccaacatggtgaaacccacctctactaaaaatacaaaaattagcggggcatggtggtgcacacctgtagtcccagatactagggaggctgaggtggagaatcacttgaacccaggagacagaggttgcagtgagctgagatcacacctctatactccagcctggcaacagagcgagactcagtctcaaaaaaaaaaaaaagtacacacagaattatgtacagcatataatacatggtaatgataataaatgaccatgttactggtttgtgtatttattataatatgcttcatattgtcattttagagtgtactcttattttttttaaatgataactataaaacagcctcaggcaggtccttccagagatattccagaaggaggcattgctgttataggcgaggacagctcaatgcctgttattgcccttgaagacctgccagggggacaagatgtgggtgtggaagagagtgatactgatgatcctgatggtcatagagtcatccataagccctagaactctcttccactacttcctctggtaaatttctactcatccttcttgttggaccttaaatgtcacttccctgcactaaccttccctgagctccttgtcgtccaactggatcagtattcacaacgcaatcctcatacaccgcacgccctgcacttctctccccatggatatggcgctcctggacttgtgcaataactgtcagctacatgtgtggagttgtttgtttccttgtgtcttgtttccttctgtattcctgctccacacataggagacttccacaaatgttcctggcctgaatgactgtgcagtgtagacctcccccaaaaaaggagagattgttgtgagtttgaaagtctgcagaaaagtgagaccagagatagtgagacaataaaatgaaggaggctgaatggtttgcaggtctcgatttgattttattttctctttttaaggtgaaggaacaatagcagtatgtgatttccagagaagaatgtgtatagcttaccctcaaatctcaaaacctccgttaagtagttctagaggaggtagggctgggttttgtcttctgttgagacagatgcagtgattattggaaggcatgcttactggtgcactggttcctttaccacaagtctgggaattaccactgtattccccaaggaggaagaaaacctgggtagggagattttcttttcaaataacattgatttggtgactgatggcaacactacaaaataaacttttacttttgttaattcaatacggctcttgagtggtaactgttcaagtttatatacatataagtatataatatctttcttctgctctctaatttgcaattattcaattcagaaatcctgattcttactaaagcataaggtatgggttctcttaagattctcacctatcttatttctgaagatattaccaagtatgcccttatttttgtgaaagtataaaccttatctccatttagctatcacagacggaaaataaaaatgttttaaaaactaaggaaaaagaattggtcttaatatgcaatgcaaatgagtgaattttataaaaggcaaagataaaaaaattataatccctttggcatgctattcattaagaaaattcttcctaaggactatgagttttaaatatgctcagcaagtcaatcatctattcattcattcaatatttattgtgctttcatttattcactcattcattcaattcaactaatttatcgagcaaccctgtgtataagcctcctgccaggtgtgggaggttgggttcactgaattagacagtacctgagtaactgtgccagtgcagatgggaataacgtaaactccacactattcaaagtgtgctccacgaactgctgccggtcctcaaattggtcattgttggtctggggcaagagaagtacagaaactgagagtaagccttttaaaccttgcccatatatgtgattgtgtaattttgtgtctgttaactctaataataaaaaatggagcttgcatttttaactgcctttttcttttacattgtactttatacaagtattgatccgtcatggactggggggcatggggccagttcttgaccacagaaagtctgagaagccttgctccaggaaaggaaagtagcacagtgccaggaaagagggagagtaggagagtgtgcgcgtttccagcctgggaaagggaagcggaaagcaatctgaaaagcctcccccagggggagtggcatttgagcaaagcctaacaggatggggacggtttggaggcaaagacaggagaaaggacgttttgaggcaaagagaaaggttgaggccaggaagtaaagggtttatgcagggtgccacgcgtatttaacgctctgtgaagcacagagcaggtgagtaataacgataataatagcagctaacatttattgaacacttaccgcaagccaggctctgtgctaagaacatggtgggaattatctcatttgttccttccaactacctgcagggacactgatttgtgaaaatcgttcccagacagacgaaggatattaaataggaggtgagagtgcccctcggggcaatgggcttcaagagcacaggcagacgggagtcagatgccgttcagggacagctgggcaccaactctattgtctgtctcctcctagacgaggatgttgccttactgggcctgagtcaggcttgtcaatgtcctctttaagtggtgggcataatattgtcctgcaagttcttttggaatggtgatgtgagcccaaggacgagaatgaatgggcaggtaaacagaaagcattggcttgccaggtctagcacagcccagccttgctgcagaccttcttcacaaccctggggacagctctgctgggctgtgctgcatctggctcctgctatgggttgccccctggaataggtaagattttgtgcctctggctcattaaatgcagaccttaatctaaccttacaaggtaagtgttctgctctttctagttagtacagaaatgctgcatttgcttttaagtaagtgagaagtgatttgtaaagatgtttcgaactcaggactaactgcctccagagatgcaggaagtaagaccagaacagtaggtgggggccaagacatagatggaggccctgattcccaggcttaggacctgaactttgattctgaggacagcagggaacataaaaatcatatgggagcttctttacctccacaaagaacattctttggctcagcaggacaatatggtgggaaatgacaaagtaactcctgtggccctaggtcaggttctcttgaggaaaacaaaaaggctggaatgatacagctcttcgtaaaccaggtgcctccagtgcctgcggttattcccaagtccacattttgcagacagggccctaaaatgtctagctaggaagttcctgagcctgtttttttaaaattctacacacacacatgcacacacacacgcacgtgtgcacacatgcggatatatacatcctcaccttttcttgagattactgctcagaagaaggcacatttggtttggtctgcttaccagtttgtgaagcacttcagcaccttttaagatgtcaagtgccataaaatcaacgtccttgttatcgtggtaaattgaccttcgttgccaaggcaaagtcagagacagagttaaccatgacagccacgaatagctgttctttgagggccaaaatcatgattttcaatgtttttccatctgaaataggggaacattactcactacagcctataactgtttcctgtcccatgaagctaaattcctacgccagcaatatggtctcaacagaagccctgaaaacagaaatgtcactccgcaaagttcttatttcagccaacaaagctttaagtttagacttaactgtgaaactgaaaatttggctcaccacagagggaactggagagactttttttttaaacaccaggagactgatgtcactgctttgcctatccaatgtcatctcatccctctcccccaaacccaagcaaactctgcagtgagtgacaaacggctgaaatttcagctttacccctcagctagcaggcacttccaaactcatttaatgctcaggtaagttttagctttaaaaaacttggtggggaaaaagaccaggtaatttatcccctattccatgaaaaacaggggagtggggacctatgttaatatgatctttagcagaaaaatgcagtgttgttaggcctggtttctcatacagatttgtttactgtatccatatttactaaaatgtttgttgctgtgactgcaagaaatcagggattaatatttacctctgttacatgaaagaacttactgtcccttttctgcaagtatttggagtcagagattccttaagtaaaaatgctataggccaatgctaaacctgaaaaatggcttagcaagatgctgagttctaacccactctgatgaaattggttatataattggccttgcatcacggatggttatccctatactttgttcttgtcatttcaatcagcccaagcaagtgcactccttctgatttagagacccaaccgatatttgcccacacagacatggtcaggacaacccccagggccttcgtatgttggctcttggcccagacggtataagagtccatttacgacatcaaaatattatgtaaactccctcatcattagagttatgcttttaacctattcatttaaaacgctgactagttatttagcagtgctttaaaaaatatttctaaatcccagaagcaactacatttatgtgaaagatagagcagaacatgttgcgtgtacagtaggcactatttggtggcaggagtctgtggcttcctctacccccagtgaagcctagaggactgcagggatccagcacccacgggtttagagtcttgggtctggtccagtgaagacactgctctctttcatatctccagagtccaccagggagctggctttcgcatcctttaatttggctgcctttactgggaggtgcttcaccatgaaggcttggtaatggatattccaaaaaaaaaaaaatgtaaataggagccacattcaagagcaccatttaaaatgaaaacccacatgaggtctcccagcaaaccactaactttaaagggagcctggctgactaagaagacaggacactggatcctggacatgctgcaccacacagcctgccggccacagccctgcttcttctgaccatggaatttccaaaacagactccctcaaggaaagccaagagcacatttttgtggcattagagtgaagtgaggtttctctttattagagagagatggcattggaaataggctcattttccctcataaggtaccagtctccaaaagactgccttcccggagaagtaccctgggaaggaaaatgcctcagttacggtaccacatggtttgggggactcaagctgtctccaaaaagccctgagaaggaaggatccatttcagcatcacaatttttctgaaccaagcggggatcaacaatgtgggcaccagaactaaatgatccagtaattattctacaaggaggtcccaaagggcccaaaagccatgatgtaatgaacaagaggaggctcagctccagagggcttcctttaggaggtgagtcatgagctgtgtttcgcactggcagagaggaaagctacgtgggtagggcagaaaaaagtgagctgtgtctaggggacaagatgaattggataggtgactcagtgtcaaagatccaccattagtgaaacactgtagaccaggcaatgtaaaggtgtcccataggaacccactgttgatccttcagcacttaaaaaaacaaacaaacaaacaaaaaacaccactgttcttgacgcaggatgaaccattttagcagtgaggggcaagatgaattgggacagcagggagactagctatgaaaatggagtaatcattcaggtgtggtacagatggcattggaatgaagacggtgaatataggaatgcaaattagtaaattaggctcaaccaagagatgactcctgagcaaattatcagacctactgcccaaccgtcagcccagttttaggattttagggttttagacaaaacagtatagggcttggctatgtataccactggcctacagtacaacctattgctaccctacaaataagagaacagcagttaaagacccccacatttcctcttcccctaagcacctcacaacatattcacctatcaccggataccccattcctggaccaagcggccattcctttgaggtgactgattcaacaaggtagtgaaataaagaacttacccagatgattacaaatgccattgaaatgtgacactttcaaattggagagggcatgaagctcaaatgatatgctcattttacggaggaagaagcaaagactgaaaacattgacgagctttcctcaggctctgagagaggtgaactgggtgctgggtgagttctgttcctggctctacccctgaaatactggaagaagctgagagaatttttttttcttttttctgagcctcagattccacatttgtaaatagaaaaaatataactaaatggctcctaggtccctgctagcgctaacttctcgtgtgatcagtgcttctaaaattgcaatgtgtccaggtggggaagttcatttaccccctatctggtttacgctcacttaagggagtgatttctttcctctgaggctctcatcttgcccattattcagagtgagctgcctcctggtgtgctgtcaaaatacatcagcttcaaagacaaacacacacctttcaatcccagtccaagagagtttactgtataatttatgataatgttaagtctgtttctcataaatgttaatggtgctacattttttttcatagatgggtaattctcagaaaagcagctggatgttaaaagttacttttttttttttttttaacataaactgcctcagccaacaaatctgattaaaacaaaactctccaggattgcaaggcacaaagattctgctaatgttagtaagtaaatccaaaaaaaaatcattcaaagattctgttcttataattgtttatctaccatgatttgattaagttcacattcacagacttttctccattttaatgtgtagatattaagaactttttactttaatccaattctttccactcctacaaattgctgaacttgtacattagtattaatataacatgcctaagtacctcccaaagtaaattctttcctgctaaaaatattttgctagcaaatattcggccttttctcatttatagaaactgtaacctttacttcgaagtgccatgcttcatcttttatactctatagaattgttttgactgctaaatgtgtttgaggaattctctcccagacgttagaaagttggattttgaaatcatttgaatctttcaaagttattccctgacgaaagaaaatgcatcaataatttcagattagttactgtactggagcttctgaaattccaaattttctattttgaagcatcaatttgtagaagaatgtaagtattcttaatttttgatgctgtaaaatgcaataacgatagacatattttaacacagaaagataaagacttcaaaagtacataaacagccagaaaaacatacaaaagaattagcttaaacaccttcaaattgcttgggctcaagatacctgggttctaatccctcctccacttgataactctgcaacctcattcattgactcatacatttattcaacaaaggcgtattcggtttgacaccaaggtactgtgctgggcattagttacagagaaatgctagatatggtctctatcctcaaagagcccatagtgtaggggaagaaacagccatgcaaacagatattcctacagtgtggtgggaacattaatacagatatacagagagtattggaaaggaaagagggtaggggtgggggaatgtcagggtttcaagttttcttaaggaaggtgattcctcaactgagccttcaggcctgccctgtctctcggcttgacagggcgcttgtgaggctctcgtaagataaagcccggtaaaggccctgtgaactaaagcacaaaagagctgtactgggattattttccatggtgagaaatagaaaagctacagcataatgagtgagttcttttgcatctctggttattaaggaaaacaaccaaacatgatttggaagagggttttaaaaaattcagtttcagcagattttctcactcttatttgtatgtatagaggacttaaaatgaaaggactatatatctccatttcacagatcaggtcatttaggcacggggccccgagagttaagaaagatggctaggggaaagagaaaaaaaagtctcagccagaggtgagagagagcagctcaggaacctggagccggacggcaatggtgggggatcgcgttttccttctgtgacactctcctcaagggtgacgctacccctgccaaatagggaggaggaatgattttttttttccttcataaaaacaagtcagaaaggaaataaaatccacatttaaaactcccaactgttttttgaaacgagtattttcttcatttcttttccaaggcagacagagcaggtgttaaggctgagttcctcttgtcatgtgaaacaaagatggccctgactaccatgtactgggcgacctataatactgacatcaagcgcaaaaaggaaacaaaaagaaaataaaaaaggaatgcgtgagggtcggagtttttggaagatgaacatgagatgacagcatgagctgggtgttgaagtcgggaagatgcagttaacagaaggggggggggggcgccatggagcagtcgtgtgagccaaggtgcaggaacaagcactcagcttatccagagggaggaccgcttcccagagatattttcaggggcaactttcgcttttttggtttgtttcgtttcttgaggcagggtctcgctttgtcacccaggctggagtacagtggtgcaatcttggctcactgcaacctccacttctgggctcaagcaattctcccacatcagcctcctgagtagctgggatcacaggcatgtaccaccgtgcctgcctaaggttttaaatttttttttgtatatgtatatatatatatatatacacacactatatatatatatatacacacacacaaatatatatatacacacaaatatatatatatacattttattttttccccccagagacagggttttgtcatgttgcctaggctggtctggaacacctgtactcaagccacctgcctgtcatggccccccaaaatgctgggattgcaggccaccataaccggtcatcggggcaactatccttcagggcttcctccagtagggctccccaggttggccttgagggccacaataaaaaatctgacttagctatactccttccctgtccccaaccacagttattcttgtggatgaggcaaatggcagcaggacagctggagtataccagagttgactcatttattttatgcatgcttagtgtggcatccctggggacatgaaattccagtgaaatccagtctttgtgctggagaagctcatagatctgtggaggaggcagatgcccacccactcactgtacagtacaaggggttgagggcaacaaaagagaagtgtgcaaatgctagtggcaacaggtgaggcggggaggagttttgtgaaacagagatgatggtaaaggagaacatgagtgcacagggataaaaacacacagtacgttttgaagacaaaagaaaagccagtgtcagatctaatgtggatgaccgtctgcttgggctgtggttctcagccctggctgcccattagaatcatctggagagtaaatacagatgccacatgtcctatattttgatatgggtggtggctagacagatgtatttctatgtaaaaatttattaggccatatacttaagatttgcatcctttactggcttaaatcacacctcaatgaaattaaaatactaatccttatgcttcaacccagaccaatcaaatcagaatctgatatgcaagcagagctgaagaccattgttccaaaggtctgatatgcaagcagagctgaagaccattgttccaaaggaggaattttaaaaaaacatacctggctgggcacggtggctcacgcctgtaatcccagcactttgggaggccgaggcgggcggatcacaacttcaggagatcgagaccaccctggctaacacgatgaaaccccgtctctactaaaaatgcaaaaaaaattagccaggtgtggtggcaggtacctgtagtcccagctactcgggaggctgaggcaggagaacggcgttaacccgggaggcggagcttgcagtgagcccagattgcaccactgcactccaacctgagtgatagagcaagactctgtctcaaaaaaaaaaaaaaaaaaacataccctacttcaaaggacacatatttttaaacatgaatcaaagccttagattccactatatactacggagaaattaacaaaaacaactaaaatttattgaggttaaaaatcaagccttatttctttttttattattttttttttgagatcgagtctcgctttgtctcccaggatggagtgcagtggtgtgatctcggctcactgcaacctccgcctcccaggttcaagcgattctcctgtctcagcttccccagtagctgggattacaggcgcctgccaccacacccggctaatttttttgtatttttggtagagacggggtttcaccatgttggccaggctggtctcaaactcctgacctcaggtgaaccacccgcctcagcctcccaaagtgctggggttacagacgtgggccaccatgcccagccaattaagccttacttctgatccttaccaccactccataacgcagactaagttatagcaatactattttacagatgaggacattaaggctcagagaggtcactgtcttgctcaacggcacagagctagcaggaagtggaactgggtggctgtctgcagtggagggatgcatatgtctccgaagagatccaagtatctttccttaagggaattactaaatatcatcaaatgacttttgtagcccaccaccatatctaactcaagctctaacaacttctttaaaaagaagcttttgctgctacagaaagaatttctgcaaagcaggaagcctgaagtcagcaatgattaaactgccccttgaaacccttagctacttgcacgtctctttgtctttggggtctcatctcagcaattcgtttcagcttcagtctgcaccaggatctcaaatctgtcatggcgagggcaagaagaaatgccctcctaacaagactctgggcatcgctggagctgcctgcaatccagacttccaaagactcatattcttcatgagcaggtaacgaagctcataggaacaggagaaactgcacaaaagcagaaaatgacaattcagaacacacacccatccagtgatggcattaaggaaatcctcaaagcccttagcaatgtaactgccaaaagaaaaaaaaaaaatgacttcctataaaaaaaaaaaagggcccaagtagaagttataataaggatccatatacatactgcaggttatgaaaattactgcagcattaaaagtgatagtagaataatgtcatctagtgtatatgaaatcctggacaatataagatgggttgcttaaggataaaggctaatactgcttagaaacaccagggaaataagaactgtatgtaagaggaaaaatattcacttggtatttctggatcacctctctgctctttgcaggagagtaaacagcatttccggatggcatctcagcagttctttacattgagagaacttctttctttcttaagccaggctctgctgtttgagctgaaaagttcgggaagacattattccacattatttcttcactccccgttctatttctaaaatctcacaatggataacagagagggctctcttctattgtggagaagactgagaactaagggaagcatttgaaaaggggcagttttggaaaactgcacaccaacggtcttttctaagaatccagacacaagacctatgcagctggaatatattttaaagtgtctcctccaaattctcaattttaaaaatgaggaaaagaagactcagggcagtgaagtgacttgcctgaggttacactgacttcatggcagaactgggtctagtaaagccgtaatttacattttatatatggctgtataacgtttaaagccctttctcagatatgatctcataaataccctacggaggatatcactttttttcagatgaaaaaattgaggctaagagaatcagtaatttttttttccctaagcttacacagctagtaaggggtggatctttttaagacaggtgtctggaatccctctctggtatccagaaattgcctgtgccaagtgtgtggctagcatgctaacgtccacatctgtaccaggctccatttgtcctgatttgctctaaatgtaagctacgccatcctctctgcccacaccccagataaggcttcttgcctgtgcattactgagtaaaatatattcgggcagcttcaggcacatgctgtactgagaaaattgagacaaaaggctaaggatgtttgggcacaggcaagaagctagattacaaaggtacatcactttcatattcatttgtacatttttcctcataagaaaattaggctttaatgtaacctcaatttcaaccttgttgctttatcgcccagagcccattagagagctatttcccagggccaggaacttatgattggaggtcaggaggctggggttttaatcgactcatgatgaagctgctttcctggggtgtcactcactcttctgtctcagctctgccctgttctcagggcggtgggtagggggtgcaccctacataagcagtgaggatttttcttaatacaccagaggctgagttaactgccaatgaggcgaggggggagcagggaaggggatgggaaacggcttcgttcattcactcacagaccaacatatatcaaaactgagcagctaaagcttgcaaatacactgcccaagataatgtaagggcaggatgtgttccctgccctgggctaaaccaggtgtctaatccatattagggggcacatgaagagcccctgaggagtttcacgtgtcccaaaacaaacaatcctcaaaaaattcttcatataaaactatctgcaaattgggaatgttctcacccactggttctagatgcacactggaaacaccgaggtaggcttaaaaaatgttgatgcttgggctccacagccctttggagattctaatataattggtctggggtgtggcatgggcactgggattttttaactgtcccttccccgtcttccaggagattctaacatgcaggcaagtttgagaagcacagctccagcagaggcctaagccagatttcccagccggcctctgacctgaaatgtctccctaacctccatgtccatacctgggaaataagagggaagggcatgacccttctgtctacttcctacatgctggggccaaccattccaggtacttgacacctctgggtaggatgctggtgagaacaccggagcaattcacttcagcctgctgcaaaatcctcgaagtctcgcttatcctactaaataaaatgtttatcaggcctcagacttcaaaacatacatgcgaacagccactggaggcctgtgagaaggttccttacccgccagcacctagcacaatgccagctctgctgattcccttcaaagcagatttcccttgctgcttcctgaggtcagcctcctacctcttagcccattatgcagcctggcacccctgccatttaggtgttggctgcttttcctttaagcaattcccttatcggggctcagggataatgcaaacatcaggaaaatactatttttatattctagtgggtacagcttataataattcatgctggtaggttttgtttcctatatatttggatcccgactgcggtctacctccaggcaggaacaaaatggatgcagttggaggcagcgggggaggctcctgaagcgtttgatgccgattcagcaccctctctgcccctctgagagcagagtgtggagtctcacaagtgttgcttctcatcaggaagctcaggagaccaacagcaagagggacgcactggaacatggctttctagccagagaatcccaagagaagaataaccctttagtttccgatgtaggtcattctttaaaagcaatgccttgtctatatttatttaactattttttaatcttgttttatttttttcccagcataacttttcctcaattcctttgcttttcaaatcctgcctgggagcaataaaacctctatcaataagactttaaaacccaggctctgttactaaggagccttgtaactctgagtactcaaagactgaacccctctctgagcctcagtttctccatctgataagaagatcacacttcactagctgattgctaaccttccactctgacctcacatgactctatcactgtaatcccctttttattccattataatctttgggtcttatttccagcatctaatccatggcaggcattaacatgatctttccttatacaacccattcttattccacccctgcaaaaacgcaaaagaaaaagtgtgtgtttggaaagggaggggatcaattggattttttcaaatttaaaaatgttcatcatcaaccttttctgtgattgcaatgttggtggtgatgaaaataaattgcctataaaatataaaactgtacctttttggtccactaaatgtcatattttacatctattaacactagtattcataccaaaagccaactatcgtattattgtaaaaagtgcatcttgtgagggcaaaagggataaggatactaaaaaacgtgacactgaatgccctacacatgtttatggaatcttatggtgtttgggtattatccttgttatctcaggtagaaaggtgttatcaaattataaacttgggggctgttgctatcaagagcagttaatttctttattgatactattagattacaaaatatgtctattccactaacccgacaaaaagagcacagtggtgtgaaacaagtgggcacaaagagccaacaaatttcgtggaattcatgcttatttcagttatacagtatatcagattgttcgttagatcacaatgaatatgttattatttgatcccaaatattcctttttgcaaaaattggattacaaaagtaactttattataccatttcaattatttccctatgaactaattctttttaaaaattgacaatgcttctgattcctctgtttagcaagaattttcttgttctgtccttcctcttttctcctcccagttccaaatcagaagggtcaacaggaatacacttaaaagtcctattttccaccaaagccctaatatcaaatgcttttgatttgaataaaatcggttccattagcacattcttaaaaaatcaattggctaaaaggtagtgaaaaaccatcacatttcctgtgagcaggattgtattgccacaggaatggtggcataggatccagaaaagcaaaatttcatgttgggaagctgtgctatgataccaattgacataagtattaatgttgtgatctttttgaaatcttgtattacattaaattatagtttcgcagctgtgtaaggagcaatgggaagaattctggtcacttttctttaaaaagctcctcctctggggctacaaggaaccaggcttggctaacataagcagccctccagttgacagccagacatagagtctccacaccctaaaatcatcaaaggctctcagatgtcttttcccctccagctttattacagcctaactgacacacaaaaattgtatgtgtttataatatatgcacaatgtgtatacaacctgatattttgatatatgtacacatggtgaaatgattaaatccagctaatcaacatatccatcaacttacacacctttttttgtactgagaacatttaaaatctactgtcttagcaattttcaagtttataataaattatttactatagtcacttcattgtatgacatccagaacttattcatcctaactaaaattctataccctttgaccaacatcacttcattccccctccttgctttttaaaaaatgactactgtatagggacagtgaagagtatgaaataaggaaactatctattttcaaagagttgtaattaacaagctactggttttttcacctcctattgtagatgccagatagaatattcacgtcttatcttgtttgaacatcaaaacactctcccacatacacctgataaatatcactatctccattttacagaagagaaaatggaaatttaaagtgtttaagtaacttacacaggacctccctattggaactccatgagcctgcgatcagcccacgctctctccaccattccatgccgctggagtgcaccacaaagcaagataaaacaccaaagaggaaagcaacttaggttgttaagtcaataaactaaggcaaacaacactgcatgcattttattcttccaatatatttttggcggagaacaaattgccctgggagaggtattgtataatttcatttggagcctcatccttctggtagcagcaaactgaaacacacacacactaaaatcagattgcaattaaaatccaattataaatatattactatattagacacctacccaggaaagatccagcaggggaccttctctgaaaggcagtgtgtcacagtcttcaaactgcttccacgtgtacttctgactgtgccccctgaccttgagtgtgtgttaaacaatgcttggcagtttttctctgagtggaaaggactcaatttatgtctcatcatggagtaagtttaataatactattaccaatttgctttggagaatgacatgcaaggaatattaaatcttcctcatgcagactattaaacaaattaaacacagcatttaaactggtgggattcaagagatggaatctgtgtgaggttaggaaacggagccacaaaaaaaggtccacatgtgatgttcacaccttttcggctctttgttcaaactgtacgttatatctctgacttgaaatgtctggcaaacagatctccaaagcaatgggcagtcacatcccctctacccaaagctttgttttcttacaacatgatgcacaaacgaaatgaatggcaatcaacaccaagtatgcatcatgtctgacgattctggagtttcctttcagttgccttctagaagatttgtgctgctggcatttaagttgattttctttaatttgacagaacatttcaacagcagaactcaggcttccaatatttttcaatagttgtccttgagctcatttgtcatcattaacacgggccatccagacagatcacccagcacaactccattcacccgtccagttctccggtgagggtgcagtacctgggctggctctcaatatttttaatttatgaaaatgtctaaaggccagccaccggacccccacagtttctttttaagtggtctggcatagactatgaggccacactgtatgcatcagcttcttacagctataggacaggtgctaattaatctacctaattatgcagtccagtagaagaggcttacccataggattttaaatctggaggaaaaaaacaagggaaggagaaagggagggaaaatgcttttggtttcacactgaaacataatttcaagagtcagcttatttatcatttctacttaagttggaatgatttgtatattttccctatatcataattgctgtgtgtgtgtatgcacacgtgtgtgtgtgtgtgtgtgtctgtgtgtgagtgtgtttctgcaagggtatacttttaaagcactagaaaaaaacagcaaattgaccggagaattattagcttacctttattttttaaactgcaaatacagaaagaaaaaaaaaatctaaacagtatataaacttaaaatcagtcacatgaaatgtgcaggatctcaaatgatgctgtaattccagcaggctcctgtttgcagttaaccacttacagggccagtcactggaattccctgggcatccacacaaatgaatataattacagataccatgagcacagacctatgacgctgttgattacgttagataactcagggatacggggagagagaaatcctggggtgtgcaatcgatgttgtcacatatattcccatggtttttccagctttacggaagggttgaaatgttctttctctggttccaactgccagggacacatatgaatgctgtgatatctgtcagggaaggggaaataactcctgaatttcctccaggggagtaaaagcagatcacaaaggatctagtgtctcagaacacaaccaaatattggcaatgcatcctgagacaagagtcaagtgctaagcaaagtcaatcagcacacgatggccccaggaatgagagcaaccaacctggtcctgcacgctcatttacatgggacccaagaagagacactggccgtggcaccacgtgcctgccttgggcccactcccttctacgagtgcccttaaccctttacaaaataataactagtgtcatgaattaaaatagctgaaaataatttttaaaaatgaataatttaagaattcacatgtctcgttaacactaaatgactttccagctgggcagaaaatcaaactctgcatttggcagttttacaagtcattatggaaatatgtctactcttcatttgatctcctatttctagatatcttccccaattctagatattttccttctctatatgttacagaaggtatttcaaaaggctaaaaaattgggtgccatttgtgattcgagagggataaaaaaaagaaatagtaaaatacctggcgatttaaaatggcaatgttttcttgaaaacattgtgttaagtgaaagaagccagacataacaggccacatattgtaatgattccatttatacggaatatctagaaaaggcaaatatacagagacagaaggtagattagtggtttccagggactaaggagaggaggttatgggggatgatcgcttaatgggtacagggtttctgctcggggggatgaaaaggttctggaactagatagtggtgatggttgcacactgtgaatgtacttaaagccaatgcctggtacctttttaaatggtaaattttatgttatgtataatttgcaataaaaaatgtgatactgttttaaatggtagagtttaaagcttgggttctaatgaatgacagttcagtcaaaggatcagaaattccgggcactctgctaaccctaccagggcttcacaaggaatttaaaaagagaaggacaatgcttccatctccctggtttcctgtcttaatcttctgatcttgagatctgcctgcaactgaaagagatgcagaactgggaaaagaggaacaaggaggcagatccccactttcccccacctttcttaatcaaaaagaccaacacacattcagtaaacagggtttccaatgtattccatttcctcagagtgtttacaaacaacaagaaatgaaaggtgtataagattactgcttataaactccaaactgctctgcatggctgcaccctgatagtgtctcctttccttatcaaaaaggaagaagaaaaacaggaagaaagcagaaagggaatggagagaaggagagatgacagtatcattagacacctcttgggtcatgagtgcctaatgaatatctttccattgctctgaaaagaaataatatattagttataatattagcataataatttactggttatttcatctataaaatggacacaactcatatttgttttggaagggatgagataaatgtacacatctgatttctgatgctgggagttggctctacatgatctcagagccaaagacttcaaaatcttccacaaccctctcatttcacatgtggaaaaaaacaaaggctcaggaaagaaaatatctgaaaagatgatattttatggtgggctttataggttttgattctatgaaaatggaagaaccaagtgaatgctttgtggacgcactgcctttcgcagtgtgagatgttttggcaggaaggtctgcttagaattcagaatttatagatatgagttcaaactgtgtttcgccatttgatagctaaagtattgagtaagtaattaatatatttggggcttaatttcctcctccataaaatggagataagtatatctagatataaggtcacttaaaggattaaatgagaaaaacacaggtaaatgatttagcacagtacttggagcagaagtacttggtacatggtagttgttggtagcattactactattaaaatccactctagaatgggtgttccctaaacagttctttcaacttttctgcacatttcaaaatgttcataataaaatgggaatcacatttaaaaaacatagggcttcaagaagaaataaagaagagaaggtgagcatctatcttcacaattactcctggtatcactgagacccagccaagttttaaaaacaattcatcaatagtggtgaagcccaggtctcctgactccaaatataagtctaaccaatattatatgcatataaataacttcagtacacgtgtacagttcagacgatgcacctactactcagccctctgtaatatccagtgaggcaaaacccaagtcactcaagagtgggaaggattagcgtgctatggttggccaaccaggtcacaccacttttgaacactgggtgtaaacttgatggtcactaacattcctgaccatgtgcttttaccaggatctatgtcactaactctctaggtggcctcatcccacttgtgattcagcaaaatgctttcactctttgtgtatttatctgttaataaataaatccatgttttaaaagttttgaattgtctgtagaaaataaatctagactctttcatcagagacttctagcagatttcagcagcatttgctggagcaaggtgactccagcatttctctagaggacacagctgcaggctctttggagctactcctgggttggggtgagtggggactgaggacttcctggggaaagactgagggaaattataggggactttggccatccactggaaaactggaggaactgggatctagttactcatgctatagaagtaataatgttattaatagaacatgtgctacactactgactatccgttagacagtgctttaagcacttttaatgtattcactcatttaatatgaaatgaaaggcaatgtgccaacatcggagctcaatttggtacagtggaaaaacatactgagcagaaattccaacgtgggcagggctggggaaggagtagggcaggagtgagaaaaatgaaactggactccagttctgccaccaaacggatgtgtaactctaagcaagtcatttctcctttttttggtaaaatttcatacttggcaaataggaaaaacttcacttggaaaaaacagcactgaattggaactgggggtagatgctgtaaccctgattactagtggagatggaacttatgggtagaattcatgccccttggggcattctccattgcctccctcactttctccttccctccctccctctctctttttaaaatagaaatcagatttgcattcaagtcttttaaaaaaggaggaatttgctcactaatctatctattcctggtataaaatggaagtagaaattcattgaaatgcatgtaatctaggggtttacagaaacagtatcattccagaaaaatgaattcaatttgttttaatttcctcaaagtttaaccacattaaatgctagcatatatacatgtcaacaggaaaattattaggttttttttttatcttaacggatgtttgaatgattgataaaccatgacctccatcaagacaaaacaaagacaattcaacaaagtgtcttacagctcgattgttcttgctgtttacaaagttttttcacggtaaagtataattacccttgacccgattttataggcattacatatcccagttccggataaaaggataaaagacttttatccttcttttcaatattatttttatagtaatcacaagatactttaataagtaaggtcaaaagataaataatgaaaatgtagatttcaatatgctataattccagttgtaaaaaaatgaagtgcaataacttagggtttgttctttagcaattataaacataaatagaatttccttcagcttttacacagattctaagtctgctgtaacagtcctgctgtcagaaatgcaaacagctgaaagaacaaacaccaactttacctactattctataaataaggttaaactatactgctggcaggggaaacgcagcccataaatttggtaccaccatttgcttggtacatttatatgattgacctgtataaatgtatgctgttttcactgttgacacttttataaatataaagaactgctgaataaatccggctatatatctctttgtatcaaaatggaacactcgactgttgtgaaatctggcggttaataaaaatagcctgcttttttattagcttcatccaactacgggaacagaatagtttaacagtaactaagtatgcttcaaaaggtaactctctaaaagtaaaactgtaaatactagaaaatgtatcatactagaaaaggtataaagggaaacattttgttcattatccccccaccaaaaaaaaaaacttgccctgttttttaaggaaatacttttcaaattatgcatataaagtaatatcgatcaggtaatatatataatgttctgcatggtaactgctaatgccctgtgggggtgtaaagagaaagccattcttctttgcatcttcctgagccttgtaaccatggaatagtcacaatgtgcatggcagaactctcagaagacttaaggtaatgattggagtaacagtaaaataaattacatttaccctttccgcaaggttacataaccaccttatgaaaacaaaacaaacgaaaccaaaaatgacccaaagtaaaaagaatctggagaagcatctatgaggataaagaaacccggagagttgagggctgatggctgatcagagaatgaggtccgctgactctaatgtcaggcaagcccaggggaaagggtgagtcacaagtcgggatggccaaggagggcccagacagacaaaagttttgttggctcgaatggaggtactctggggccacgactacattcaccccatgaacttaccttctctgttctcctccaacctgagataaaccagtcctttcttgaaattgactgggtgctgtggcattatacttaaggtttctttttagttccaggaatctgggaacatttgctatgatgccacccccttaccttttctaacgcctacccttcttcctactgcatcatcaggctcaatgaaaataaatctttaactgtagcaaaatacacttaaattcttccacaggaaggcaaaggctcatgaacatcttgccaaaacacaactgaaaggagaggccaagtttgtttgttgaaatcactgtctggtttcttttactatatgtctgatttcttgcagactcaagcaggtaggtcactgatttctggaaccacaatttactatgtgaacagccctgggtttccttcctttgccctcagaactgttatttgggactcaggatgagcaccctgatttagccatttatggctcaatgaaactttatgtccctccctcagagtctaagaattggcttggccaagccagcctgaaagtgcagaatggtctgccggcttattgatgatctagagtgttcatacactaaggaaagtttcctcatcagtttgattttaaaaagattccctttcccacttaagaacatctagtccagtaacaacaaagagcatgggctctgcagactgctgctgggctgtgaataccagctccctatgtaaggttctgtgcctcggtgcctcatttacaaggccagaggttctaacagcatctcataaactctgcaaggcaggagcaaagaatccctggaaaacattgaggagggtgccaggaacagaggaggcactcaataagtattagcctttactattaacccattaaaaatgctgcaagaattcctattctcaaccccttgggtaggaataataatacaaaactatgcaatggtccaatgttgatttattcaaacacaaatgtgcttataaaatcacattctagatgatgaaatgcacaccacaatgttcaaaccttagaccttgttctggttgtccttggcgcagtatacatgacacaagcaagcatctgacaggtgtgaccacactttgagactcttcagagttctatgggcctttggaagggtgggcagtttccttcttcagtgggtcactcactcactccccaatcttttacttactaccgcctatagaatcatagaccctgtccaatataccactatcctgagagatttcaagccaaaaaatacccttccaggccacttccatgccactatcctgagagatttcaagcaaacccctgtccaacataccactgtcctgagagatttcaagcaaaaaaatagcagtggctcatgcctgtaatcccagcactctgggaggctaaggcaggcagatcgcttgaggccaggagttcaaaaccagcctagccaacatggtgaaaccccatctcttactaaaaaaaaaaaaaaaaaaaaaaaaatccataaaaattagccaagcgtggtggtacgtgcctgcagtcccaactacctgggaggctgaggcatgagaaacacttgaacacaggaggtggaggctgcagtgagccatgattatgccaccacactccagcctgcgctacagagagagactctgtctcaaaataataataataaataaatttaaaaataaatgtttgctttaacaaaacttttgtattatgtgttcctaccataactttggaaaactaatagtatctattctacttacagcaagtgcagacacaaactaccaataaagcctattttgtttcccaaagtgttagaataatatctaagtgtgatagtttttctcacactttgatgctattctcacatttgtaatgttagaaacttgtatttccacatcaaaaaaaaaaaaaaaaaaaaccacaactatcaccaaatcctaaaaccatgcggctacaagattccagtacatccttatccccctgcagagctgcttttgccgggtaccagggaagcagagagcaggactgctagaagcaggggtggtgaactaagaggtaggtagatatgataagctagcccattggaaaatctaacagacaccgagcatcactgacagccaaaccacacatggtctcacattaaacaagagagagccaaataagtgcctaacatcttgacccaactagccaacttgctgccacctttgaaacactagtaaaactaacccatagctgtatataggctaagatgaagaaaatgaaaatggaaagctgtgaggggaaataaaagcttccagctcatcaaacgttcaagataataggttaccaagatgtccaggtggtatttgtttgaacatctttgtttatcacttgtcttcctttttaggtatcgaccctggtttaaatttagtgtgccgcttccagatttattttccactcttcttgaaagggggtggaagagttcctggccatagaagcacagaagctggccttccctcccccacccaaatattaccacccaccctcccatctgaaagatttgtccacaagaccatgtgagaatttcttcttatactacctaaattatcctcctatataccatttccccccattttgtttcttaaacagttatgtgatgctgacaggcactgttatccagttgttacgtgtgatgctagagttgggtccattttagtggtgctgaagttcatagttaaacaaatttgtagccagtatcaaatgtttggagtctcatctacagttattatcaacaactcaagcaaaatcatttaagtcctttttttcttttaaagggtagttactatttttttcattaaagaaagaaatgcaatagactacaatgagacaaaacacatgagcacatgttaccacaagacagaactggggaagaaaagggattttatttctcgtaaagaaacaagaagtggagacgcagtcgaaagagctgtccttcagaacgaagggtttcaatcagtataattcagagttactgggactcatgaaccaactcaaggcttgaagtgaggatgctaatcataatgatggcaattataacacattccacggcaaagcatttgaaactttgttcacagtgccttcctctacaggacaccatctcttcctaacatttatggtcttaaaataaggctcatgaatatcacctttattttgagtccaaagtcaagatggcctcagctttacataagatatttcctggaatttgctcttttggcatccactcattccaagaagagaaggtccagcatccaatgactggagaccaaagctgataagagtcccctctaaaaaataaataaaaaagaaagaaagaaagaaagaaagaaagaaagaaagaaagaaagaaagaaagaaagaaagaaagaaagaaagaaagaaagaaaaaagcaagggtgtccagggtggcagagttctctctccagaccaaaataaacatgaccaacatgtaaatgaaaaataagatcctaaccaaatctagctctgtttattctaaagttatcctttgaagactacaaactccaacatgttttatttctctccaggctcttcatcattcactccctctgtagctcatacaatacagacaatatcagcaacagcagttatagctctaactttcattttctctctggcgcccaaagtggcccaaacctggagactgtggctcaactgccttttgtgtttttgaacattaactttcttaaaggaacagaccttaagttcttcctacaaaattagtataatgcacacacttatccccatttgtaaaatgccctctttcctggcagcacgtgcccatggcctcactgaacctgcagttaaaagtggcatcagcttgcagcagcagtcacagagctgtgccactgtgctgggccgttcctaacacagatgttctccagagccacaaacacacctcctcttgggctcagaacacagctaaagtgcatttagcattttgaaatttaaaacatgtgcttagatgagtgccactcttgctgaacaatcaatttgcattacattaaattaacagtaatggagggctataaaattacacattttatgcattaaatttaatgatgaaataataggtaataacaggttaccaattctgacataactatcacacaatcagtaaattcactcaacaataatgaataacttcaaacatcccatttcctgggtaacaatcttgaaagagaaacatataaattggaaagttattgtccaccaggaaaacatacttaccctggaaagagacatacagggggccattaacctatagcatatggttaccagagacttttccatgctttctttatattgagtcatttgggaagaataaatacaaaatcacctctattttgacatgctgtttccatatcattcatttttatggtaaaaaacactaactcacatgcttggaataggatgagaacaaaggtggtagttcttggtaatccaagaaagtgagaaacatatgtatttggttcttaagattcatttgggtttttaaattaaacaacatgatttatttttacttgtttttttctctaattatctatgagcatgagacacttttcaaaaaagaagtacttaaaaaaagtgactcacatagacgtgggatggagctagatggtttcgtgtatgctgaatgatgtatgaacaaaaatattcggagagcagacttcatacaatataaaaacctaagtgcttcatgttggccgtcattactcccccagggttacgaagaccactctgaaaatgctccagttgcaatgtttgcctgttttgagcaccgatttttggatgccctttgacaaaaatgtgtgagtctttatatggcaagaaatccaagtccctccatgcctccagatcaaactgctacccctcagcaaaaagcttgtaccccatagatagagaagctcctagagatacagggagggccttttcctgcacagtctaggctgcattctgtggaacgtctgtgcccctcgggacatcaagaggtgctctgagggggaaaaaaagccattctaagcaaaaacaaatgttctgcaaatgctggcctaaacagagataaatgccatgacagggacactgcataaaataaaataaaaaaataaattaaatttaaaaaaaacacaggccgggcgcagtggctcaagcctgtaatcccagcactttgggaggccgaggcgggtggaccacgaggtcaggagatcgagaccatcctggctaacagggtgaaaccccgtctctactagaaatacaaaaattagccaggcgtggtggcgggcgcctgtagtcccaggtactcgggaggctgaggcaggagaacggcacgaacccaggaggcggagcttgcagtgagccaagatcgcgccactgcactccagcctgggcgacagagcgagactccgtctaaaaaaaaaaaaaaagttaaaaacgtttctttttaaactgcaaaactctctatctttaatgctaatatgcactgagaagcaacaaaggggtgatagggcaggcagtgctccccaaactaaactgaccacagaaatattttccacagaacaactacagctacctcaccaatcaccatcgttccacggagcacagtctgggaaacacttgtctaaatagattagaagaatcaggacattttgccccaaaagacccaaagtcttgcttactttcttagaaaacaaaaacaaaccaacaaagtaatgaaagaataaaaagtaattcacaaaaagactgggacataaaaaaggagggcgagtcttaatacatcaacttttggatttgcaggtgagaaaatgtgaccaagttaaaccagaggccacctaaactggcagtccaacagtacttctgtggctttaagggacttcgttctcactgtggggagcagagcacttcagagaagctgatgtgctcgattccgcagggagagcttcagcggaaccccttgctcaccaacctcttaatgaaatcgagagagtcgactactcctgcctccgtggctggcaccagggcaggagagacagagtgagtttaagatctgataggagaaaagaacccaaaaataaatcacaagaaaaaataaaaagatgtccacccctaaaagcttgtagcttcattttctgaaaattctagccccttgccctgggttttctttaaaaatatagttaaatgaattggattgaaaggaattgttacctgattggaagttcctctcacaccagaaaagttctgtgagatgctggaggacaccatttggcacttcccagacttcatttgcacattctcagttgtactgctataaatgtaaccactggtgtgcatatacattcacagtacactgaatgtacaatgttgaacttatttttcgagagagaaaaatttctcttcaacatgtcaatggtctcattttaccagtgtctgctcacttccaaaaatgcaaagacagaggaagaaaagttcgttctgtcttcactcgccttatgtatacgcagaaggcccaacacggtacctaaaattttcagcaataccatgattccattaagagctctggatacaggtgcttttaaagtaggttaaggaattatgttgcctggtagggatacttaacataccagcacctgtaggtgtgcttgattaataacccccgccaaaattctactcatccttaaagactcagtttaaatgccatctccttcaacatatattctgtgatgttgccacccggatgtgacttcttcctcactttttaattgttatctgcttgaactccaaaacaatgccccgatccagagcaatggaaccagggaagatacgttccaatggcagacagaagtgacgaggaatgatctgatccctatgggagccactggtgaactagagatctacaaggggaccccaaaactttagcaaggaatagcaatgtggagatatggatgggagaaaaaaaaacctcatagcagaggcgcagagctgaccttacagcagttttatcaggggtcagccctttgcctagggtttaacgctggtactctgggcagtggcggggggtcagggggaaaagaagaaactattgtaccttcatatttggagaatatttttagtcttgtgttgacgtgtgagctgccagcacaaaatacaccaaacaccttcctaactccctcaaaccaaataaataaatgaaaagagaggctgttgaaaaccttgacaagcagcttgtcaagaaaagctgttttttcacacaagaaacctcctttcagaaccctaaatcctaccaacttccattctatttgcagtacccttatctgttagtatcacaacggaaaagtgtaaattggacccaaaaaaatcctctttatttttaaagccaaaaactgatcaaggagttctgtctacatttcaaaacactgtatgcatatttcagagatatatttatagaccatacaaagaggtgcaatattgacttctggggttaatgcaatatcccatagatttatcttatacattaggttcttcaacctatgttactgagaataaatttttcatgatcagttaagcttgtaatcgatgtagaatttggaatgaagtatttatcagaacaatttgtgactggaatgatttaaagccaatacacatgttatgtaatcttctgccctgttataaaatccaacacaattgcttaggactagcgagagacacccagagagcaaaagaaaatctagaaaagtggcaaaatgatccattttaatcccactgaccagcatgagaaaggaaaaaagaaaccagaataatgcatttttaaaaaaattttagaaatctattggagaagaaacctcagaaagactttagaaaaggcgtcaacagcttcagagatacaagactgctgaggctcaaacagtactacggcttgatttcataaggacaagattgaccctacccagaacagccagaatgagaaatggggagtgtggctttatcaggcacacagcaaggtcccgcaagcctgcctggcaggcccctacctactgctttgggtttaaatatcctcaaatcgccctgcaaaatacaaacaggtcgactgcaggaggcacagagacaaactttcacgtgagcttggattggactaacacctcattagcaaagagctgcctcactcagggtaggttcaggagggggaaagagagcctgatgcctgagcaggtgagtgcttccaggtggctcctgggctaagtggaaaaggggagggacaggagggtaaatatggggaaagcctctgaacaaagtacaaagaagggaacagaaggaactaagacagcagttaccctttcacattttgtcagaggatcactctgtgaatataacagtaacaatcttaatttcaaactacatgcaatatagaccatttataaagtttttttttttattgttgttaccctgaatatctctaggatttttctgtggattcccagagtgtttcagctgaattctctagctccccacctcctctgagcacttgctggcatatttccaagctcctctggcatctctcaattcctcaggaagatacctattagccccttcatcttccttttccattttgaataagacagtccaatcttgacaattattaactataactcatcaaatatgttcctctaaaaagacatatttagggaagcactgacaaagacactaacagacaagctgcttcatgctggttcccattaaaatatttaaatatgttttcaggaaagaaaacttttaagttatttttccaaaacagctataacactgatttcaaacctgacaaaaataaccagaaagaaaagtcagatcactctaatttataaataataatgtaaaaatatgaactcaaacatgagcagacagaatccaccagtgcaataatagaataagataccaccaccaaatagagcttattaaagggataccaggatcattcaagaacagaacttttacctctgtcattcataatatcaatacattatagcagaaagatcctataatcatcttcacgggtgctaaaaaagcattcgacaaaatcaaaatccattctgatttaataggcccttaataaaatagaaatccatgaatattttttgatatgggaaagagagatatagatacacatgcatcagctcaaaagcctaaatcatactaaatgataccctaagaggcattcctattaagacaagaatggtcattgccaataccctataattttacactttctaattagtactagtgcaatgaggagaaagtcatgaataataaaaattagaaagagacaaaattattatttttgcagattatacatatatgtacctagaacgccaaagaggatcaactgaaaatggatggatacattaggagagaaggcagatgcttataaagctagtacacataaatagcttatataaacaaaagccaattaaatatacagaagaaaggtatcatttttaagagcaaaatgggcatatatttaaaaaaataaatttagaaaagtatagaattcacaagaaaaaaattttaaatcctacagagagatgtaaaagctggcaaaataatggaaagacagactttgtacttagatggaaagactcattgtaaagatgtattctcccctaaatttaatgtgaatccaataaaaatgtcaataagagtattttgaaacttggaatgttaattctaaattgcacctgagaaattaacctgtgagcattgccagtaaaattctgaaatataaggttattaactctattggctattaagacatacagtaaagctaaggaattagaacagtttgttattagcaaaccaacaatcttctgagggaaaaaatagttcagaaataaacataatgcacatagaaacatttgttatataataaagttgacatttcagatgtgggaaaatggtggattgtctaataaatatgttggtacaactggccagttagtagggagaaaataatgctggttccactctcacttcttacataaaaataaatctcaggtggctcaaatatttaaatgtaaaaaataaagatcttagcggaaacaaaggaacattagaaaaacaataatcttagcataagggaggctctattaggcaaggaacaaaaaccaaatgctatcaatcaaaagagaaagaaaaaaatgataaatttacattgcattcgaaatttctgaaaggcaaagaaaaccacaacaaagtgaaaagcaaatgacaaagaggcaaaagtatctgcaactaatatgttagataaaaggctaatttctcctaaacagaatcccttcaagtctctaaggaaagaacaagaaccttgtgtaaaaatgggtagggttattgtcctctactgggctccctgggaagcagatttaggaggtggagagtcatgtgcaggtttattggggagtattctcaggatcaacacccacagaggaaggaaaggagccaggactgttcagagacgttaggcagtgatgaaatcacaacagagacctcagctgattccacgggcagctcgagctgcgatggccattcagagttgtcccaaactggtaaaaaaggagctgagccttttagtttttggatgtagggtattccgaggaaaggggcgtgacttggccaggggagtgtgttcagcgaaggctgagttccttctgctacccacatgcacagcaactgaggactgagaacttgggtcctacagagggatctgggaagctcagcacagctgccatgactgttagtaggaggcagtccatagaaacagaaaagcaaataatggctagtccatatacaaaaagatgctcactccattcataacaaaatgtaaatcaaaacaagtatcatctctcttatcagataagcaaagataacatggttggcaacagagttgttaatactgatattcttaatgctgttgagtggaatatgaaactctaggatctcttggaggaaaatttggcagatctttctaaatttgaaatacaccctttgacccagcaccacatttctaggaattgtttctatagacagagtcacatgtatatccaaagtatgcactaaagttattaacattggctactttgggggagtatgtctggaagtgaaagaaggataggaaactataagtttcgctgtatatccttttacagtatattgaattttttattctgtatgtgttatttttaaaaatattaatggtcaaaaaggaaatctgaacaggaatttgagatacctatctataaagatatcttgatggtatacgcctctatctaaaagaagcctttttttgtttccatactactatatctaaaatatcttctagattatcttacactcaatgtcataaacttacttctctatacaggatatctgtacaaagattttaaaaatctagatgtatttatcttatgcatagcaaactacaccaattcaactcaaatcctggcagttgttaacacttttggaaagggaactgagctactgatatactactgtgtgcctactatactaataggcactttaatacattatctaatgtaatcccaacaatcctgcaagttacgtcttatcattcccaatttacagatatggacacagaatgcacacaggttaagtatccagtgctctgtcatacaactgaatgtgggggagtccaggctacatctagatgtgtacttccttcgataacatgctcctacctcccagggtattttccttttggcttccaaaacattttgtaagcaaccactggtaacctcaaataagtggtatgatttccattataaagaagaaaagactgagaaagagtaacagagaaatgtctttctctagctcagaaagctacaatttcacatagtcctaaaatgcctgtcttcatctttctgttatctccttttgaatacacttcaatccactcataacccttttcctaaaagagaattcaaaagactgaggtggaatctctgcctcagtcttcctctttgaattgccatcagaaaaacgatcaggggaaatatgttcagccaagagaagggggcagtatcccagcaccatcattttccttttaaacactaaactccaggctatatactggaaacctatcttagggcccattatatgaatcccacagaaagagacccacaaaatttggagacaaaaaagcaatagggagacaaagtgaaggatgcttctctcaaacatcaggacaatttacttaactaatgagttatgagatagcaggtagcttgagtttcccaatatccaacggaattgtttcccaaatgaaaacaaccaatgccaccaaaaattagacttgagccaatggcagaaatcctttttacaatattttaatcgtaagtaatcagaatgcatgatgggttggtttaaaaatatgtcgaggatttttcccctagatagtgttgctgttatccaaaggaaagatgctattgcttctgctccactgacactgtttatcacttcgcccagacccttcaatagaaattgctgtttctcactgccgaccatctgttgtcatctacatgaaaaatctacataaatccctactagttgctgtatttcagaagtgccccccaccaaagaaaatcacagattaattgttgctgctttaaaactctaagaaagggaaatgaatctaaatataccttcctccccccaacacacatacacatacacacacacacacacacacacacgcacacacagcaactttcatctataatttagaaaatggatgcagttcagcaacagttaaagactaatttcttatgctttttgtgcatttacataattgattcactagataatgcactctgcttccttatttaataaacatgttaatgatttcagacaattactcaaagctgcctacaagtgtctgcctaagaaaagcaacaaaaaataattaaaatgaaaatacacaccaaaaggcacatccttcatatcacattacacaagatattaagtcaatatgtcaccctgtcaccagtcacttgctacctgctgttatacatttattcaaattctaatgtattagctgaggctgatacattggttagacacccaagcgggcagacacacagagctagaaaataaacctggtgctttgtcagggtagaggcagtaaaatagcagcagcaaaggaggggagacaataaaacacgggacagaaacagaaggttgaagcagacgctttcacaagaaaaccctcttcaggctattcatggtggggggcagtcacgggggaactaaatggattccatttcctctgccacctctgagtgcttggagagcaccaagcgggccagacatcacaataggttagattttggcagatgcctcatgcattctggccattttcgggcttattttattccccagaacctttgcatgcgtcaaccactagtcatgccttgaaccacacagcaccgtggtcgtttccaccacccaagagaaccgtaaaggtggaaaggggcattaaaggagctcagatgccagacagccacgactttggccctctgtggtgcctggccagtcccactaggcttggctcttccagttcctgctggaagccatgttgcctgggcaccgtgaggctcaccctccctccccagccctccaggaagagagaggtgggtaacccaacaggtgcaataggactctgaagaaggaatatgagagcttccagcccttgctagaagctagctgattctggctggggaagtcctggttccaaacctcatagaagataggttggaagcaggaaaaaaagatgaaattatttgaggagaaagttagctgtccatcagtaacttcttccgctagaaaaggagtgtaggaagaagagtaagtaaacaagaggcttgcttgaccaggtgacactcttcacatttctaagcccaagtgtcctagctggagttaacccatgacttcagtcctaaaagaaaggttgatggtcagtaggcacgtgcgcacacgcgtgtgtgtgtgtgtgtgtgtgtgtgtgtgaaatctttaggtttttttacctgcctccttcactgtataagcccaacctgttcactgtgtatcatgcagaggaaacaggcagaaacttggcagggcaggaacaaggatagttcatccagaattaccttaagaaataggcattttatcaggaaggttatggagagccactaggggacttgaaacaaagggtgacagaaactgttttgcttccagaaggatcattctggcagtaaggtggaaaatggcatgaagggaacaaagagaccaatgaggaggctgtcacatcaatccatcgatgccgaaggcgtgagccaagggactggcagtggaatctgagtgacatcagcggcaacatggggctaaaagaggagccactgaagttttgaggatcaggccacagcagtgatgtggaaggagatgctggtctcagagtggaagggaaacaggaagtgggcaggaggtaggtgggtatcagggtggaagaggaggtatggtccttaacacagctttgtttcagttggatgctggcattcaggtgcctaaggtacatccaaatgaagtattcagaagatggtgccggaattctgcctgtagtttcactctcccacatattaaatggtccactagactacaaaggcagcaaaagggatcttttacccgggttatggcatcaccccgctcaccatcagaaagactctctctagtctctggaaacaacaaggcatgaaacagtagatccactcctatcaagtagcaataaaatacctaatcaataaattaatttaaaccacccctcccttgaaaaataaagaacaacataaatagaatgggaaggaattgcttaatgacattaattgcactcctgcaatttcatggccaattcattcatgttagaaagtggagcagataattctctaaccaaatgtccaatattattatgaaattcttataaatctactcagcagttaatttaaaattagattagaatgggatcatgaagcctgactaggccgaggggaaaggtaacctaggtgaccttttacagaggcaaaaatctacccaggtatgaaagttgattaaccaaagggagtgcacacaccctgcctaaaaagcgtgtggactgcagaagggaggggcagctgcatctacggatagacccatgatgggggctccctctgcagctctgttggggcttcacatcagacaatgtgctcggtcttcttgatgatgccttctacaaatgaacaaaagctacattccaggattccaaatgctgaggtgtggcttacgtaatcaaatgtgagccaggtgttagagacttcatccattcagctgactctgttcctgtgctatctcctacagaaaaggcagcctcctcgccagcttccaccagaaatccaacaatcccagacctattgtgattgttcgtgttactgaaggtctgcagagccatggcgggggagttcccatcagagagtctctttccatgtctctgtgcctagcagctccatctctggtctttcttgtctctcttcatctacagagaaacctcatcttgaaatctggatacccaaggacttcactctatcctacaacgaactcatcagacaagtttctcatcaaaagaaccccaccaccactactagaaaagaagttacttcagcggttaagaagacactattctctctaaatcatttccttcttatttatttatttattgcctttcctatctccctccagaaaggatctgaagaaacttacagcaaaggagtgatgtgccataattcagctatgaggaagggagggagaaaataccctgaccccatgatgattagaactgttgagattccatatgaactccagccaggagctccaggtagccacaacagaacggaaagcactattctggaatagctatttatttcatattgtcataatgataaaacatcctgataccccagaggagaaaacttcagggcagctttcaaagcatcaacttggaaggccaaattattggataagaagtcccattttgtctcattcatagccatgtgacttcagacagttttccattttctttattattgacttaaggaaagaacagatatcggactgggagtcaagaattactggtgtgatgatgaactctgagtccaatggcaaacagcttcacctttccagtgaaacaggaggcaagaaccaaacacagagctttccatctccaatgtcatatggtttttaagataagtatcattggttttcaaagagtactacacatggttaaactcctttctatgtggagagacaggactaacaccccttataaattaactcccaagcttatatagtatcttcaacagcctgtggttctgtgtaacaataagccacacatgacaaggggtgttccaccatatttcttagaagtagaagaaatacacaatcagaaaaccatacgcgaagcatttattggcctccttcagttaatcctctttgggcttataaagctctacatcaattgccattctttaaaatacagtgtacagtttaaaaataagcactgtagagccatcatttgcacacacatgaacattcacaaataatatgtacatacaaacagacagtctcatacatttggtctatatttaatgaccttgttcagccctccctatgctaacactagtatgtataacaatcttaatttaaacccatactcaaaagataacattcctaatgaaacacaatttcaaattggagttaaatctgtctcctagaccaaaatatacaaaaaggctcttgcttatatttttaaacttcatgtgacttatttaaagattcaaggttttcgctgaaatgaggcatagatgactaaactcatttcggctaagtagtaactcaggcagaattctacctgtggatttggattaatactcctcatcaaaacatatggaaagcagtttgaccaggggaaactatacttttctcttgttctgtttaaggcaatggtctgaaaaaaaaatgtgctgggaggaaaattgccatttctctacttatcagtgggcatttgtaatcattacattgtgtcagctgccctttggtgctttcattttttaaattaatttaaatagaactatgcatatctgcagagcttttaaattattagaaggcaaagacttaccttaccaagaaagagaatacaggtattggaacttcatggattacctgacgcaagatagcaagtaagttgcacacatgctgtaattcctacccatcatccagagcagacatcaccaatagatcatgaatagcactcttttactctatgcccaatgtagccttagatttcttttcattgctaccaattgatagtacatgagatgaaagctttttgtattctgtgatgtcatccaagcctgatgttatgagaaagacaccaaacaaactccaagttgggtaagatacacagtagttaggcaatagagccaggcctacaccctgaactctaagctctaaatacagtgctcttccactagacattaagcgcaatgttgtacacttaatatgtaatcctaaataggctgagtgaatagatgaaactttcccctttgttcttcagtaccttctccttttcttttggaaagatatgtctagaacaaagctcctaatcattattaagtcataatttttgggtaccaaatgaagcttactaggcaaataagaaatactgcaactcatccatctgttcaaaatactggagtgtcccattataaatcatctcatgatatcaatctaaatatcctgcatgttaaatcccacaggataagaactgcacacctctgattttgctactattgatctgtgacaccttgaactgaatattcccttctctggccaccattgtctttacctgtaaaacgaaaagtttcaaagatctgacctctaatatactttttgaatacgaagcttatcaagcatgtactttaaattcagcagctatttattaaatgtctcctggaagcagagcactatgacaaatgcaaggcaaagccaatggaaaaaaaacctaaattctggattctgccctccctctagttcctgcattcactattagcacatggtttgtcttgccactcgccaggcccatatcacaaagagggcccactgtgctctagagttgtggaaaatcgttgttcccctttctccatgaagctgtcagtcagagtagtttgggaaaaattccagtgcgatttcattctccgcagctcaatagcttctctatatgcaaactaaaaacaaaaaacaaacaaatacaaattccaccaaatatcctggtggagaatcataaacccggaaaggcagtggcaggaaagcaaatgttataaacacatattttaaatgaacgtttttctgaagtcaacacctaaaactcacattctcttaaagcttccccaactcctaaactggagaaatagttgagttcctgcccagctatcaatgaaaagaagctactagaaggaagtggaataagcaagcagtcccgaggaatatgaaaaaacatgcccattcactgtgaggaaaagagtcattacagatctaatagatgtttccttccaaatcaaacatgtttatgagcaaaagtaatatttatagttaaatatcatatatttatatttaaatgttacataatcatatatattataaaatattatatgtaaatattatattgttaaatatagttcaaatctagaaaaaatattctattgtgtttcacttattcattcaacaaatatgtactaaatccttttgtgtgctaagtaccattctaggtgccggggcatttagtgaacaagagatctttctgcccttatagagctcacatttatataaaaatgaagcctggaaagcaactttttaggacatctctctaagcatccatccatccacagactcaaagatatttattaggtaactacatcatgccaggctttaggttaagctgggagaaaatcaagaacctaagatgcaagcacttgtagataaataagcaactccctacagaataatgcaggtctggacaaagcactgtggacaggctgctactcctttaaatgtagctcactgaagagctactttcatggaggtacggacaaagcattgtggacagaggggtgatcaatgttcttcacattttagaggaagacaagtcacaattgaactggcctttgaagggtgggtaggtgtgtaccaggtcaactaagggggaaaaggtgtcctgattgataatcctatcagaaaaaaagtcacgagagtacacagagggttggacatccacaagaagccctggagcctgcagcactaggtagggattggaaggagaggattccggaaaggcaggttggagccccaaggagctggtctcaatgtcatgtccaggagttcgcccttaacctgcaggaatggcaagatgaacccatttttagtaaatatctggttcaattaaggctacaccatgtatacctaagtggggtgggatggtttatccctcaatgttttgattctcctccaactccaaaaccagtgagggaaattttactaattattactaagaaaggacatgggagtgtgaatggcacaggctggacagagcccaacacattcagagagagagaattttcttcctttcaacagctgcatccagtgagcagctgctaacccactcatagtgccagagagactcagtgggtctgatggctgttaacgggctttattaccttgttgagtacctcaaactccagttactaattacagggcatcgacttgaatgtttggctatataatttttgttaattgatttgcatgaggggatttgggcatgatcagctgtaaatgttcttccggctctaaaactccatgactcttctctattgctacatgcatcaataatgaccttgtgtattttggattgtgggtttcatgcacaattgctaagaacccttcaattgctaagaaccctcaggagcaaagttgttatgcaagggcacacaatgacatggaggcccaggccggaacaggacgcagccattatcattcatgctagctagcatttattgatctcctatcaagaaacagatttggtaaggccaagccacttctagccatttagacaccttgcctgcagtgggctcacacagcttatagacacgaagcaggtggttctgcttgattagtgaatctcaaacccttatatcctgcacttcctagccaaatcctttctatatttctccttcactttccaataccaggtctttaactcaccccttttctcatgcccagttcaccctttaacctccccaaatccacatctcattttgaaggcattcctccccaccaacaacattactctttggggtctttgactgacattctttttcttggcatttcctatttgtgggatgaaaaggggtacaaaagtaaaggccaagataggaaggacccacaggtaggctgattcaatatttacataccagacttccctgagaccatcagcgaactgctggtagaccaagcagttcacactaactctcagagccataagcctttctaatgccctggctttcaaggtgaaaaatacaattactaagaactgtgagccacagcactccattaccaactgagcttccgggcaagagatccttggaaaaatctctgtagtggaaacaagtgattctcagtcacagacaggtcacagatctacgtgacctgtcatccagatgggtcatgagccatttgttgctaagagtagtacaaattttaaagtttcaaaataattaaactttacttcgtaaattacaggagattcaaggttatcatacagtcaagtccctctcccagccctgcattctggtatgtttcatcaagtgggaaggaaaatggtggtcttagagctagggtacccattgtgtctttgcctcagtgtgagtgtgtgttccacatggaaatgttattagggcagttgtggcaaaaaatacacactgacaccgtcggctggctcaagaatagagagtgggctgagaaatgggaaaaacaatggttctgcctctcgcattgtgaaagggaggtcacccgggcaaggagtatttctttgggcacagatgcagagattatcacgttcccggatccagatgttcgaagaaagttacagttagacaggacaaatacattgtggagttctaatatacagtatggtgactgtagtgaataacaatgtgactggcacttggtatatttcaagacagcaagaagattttaaatgttgtcaccacaaagaaatgacaaatgtttaaggtgatggacatggtaattatcccagcttgatcattatacaatgtatacatgcattaaaacatcacactgtgtcccgtaaatatgtacattatgtgtcacctattaaaaattaatttaaaaagatgaatatcagcatgttacttcaaaaataattaaaaataaaattccattaaccttcaaataaatactaaataaataaatttaaggtgattttctatagctaaagaaaagatagaagaaatacatcttcaggcatataaatcttaaatcttgaaactagccaaatccaactcaagagaaagcaccaaaggggtttatattttgagaaggaaaaaacagtgtgaggaaaacagaaggttaatgaacaaagctagaagagttgcccggttttccctttttaaatacgccctagctgtttggggagttgtggccgcagccatgggaagatctttggaagattccttgggctatcaggcaacagagaccgatcaatgggaaagattaagcaaaataatacacttgtctatgatgcctgacaaattctgtctcatcttcagctgtgaggggaaaaaaaataatagtttcctccaataacattaattacccaaccacagaagaaacttgacaaaggctgatgatgtgtttacaaacagcaaagctggtgaatcaccaggcccagatccaaggattcagatacctcagaaccacagctttctccttgccacactccaggtggaaggagaccccgcgtttcaacccagccaaggcaggaatgcacacacgggcactctggactttgtgttctggaaaacgggattatacagagaagacaccgttgacgtctcagaacccaacaggctgggtgttaatccagctgtaaccattcactctccttgcacatgacttttctggaagatagtccctgaaattttgcagaagaaaaaaaaaatctcatgatctgctcaaaagccaaaggactgttcctactctttactgggtgagaagccagttccttgtcacttctctttcttttttttaagagcataaagcagaggaaaagagaggaaaacaaggggggaaaagtttgaagatatgtattaagatatgttaaaatctgttcctgttgccattttagtatgattctagattttttgtttgtgttataatttttgcaaatggtccaatagtgtggaaaaggaggctgcctgagatagtcggttccttgagttgtttcttttaatcagaaaagaagaaacaagcagtttcctttctgcccccacaggccggcacccctacagtacatgagtcataaaatagctcctggaagagccagttccatcaagtcttctcagcaactctccattaccttccccagagacctggagagatggcgccagagaacagcccagcaggaatctgtgggagtgaaaagcaaacaggaagcctgagaccctaggaggtagaagcactctgagaaggaggaaagttctggaagctacagcattataagagccatcctttagggtataaagatgaaatacagcaaaggcttggaaacagaaagacccttaaaacttgacgtcttctccagactcccccatgttataagagatgttaaatctgaggtgaaaagaggttaataaatttgtcaaagtcacacttttataacttagtactggcccatatcaaggatttgctttttcaaaggattttccaggttgcaaaatatggccagtgcagattcagcccaataccatctatcttttgtaatgaatggtgagaaggatgttcatcttgaagaacctgggtactgccagagcctccagttccttctaaatcagccaaacaatagtttgatcaacatattttcaaggtagagtataatttatccttttccaagcttcagaaaaccaaacaaccctgcatggtacatgtagtaaatctgaaacagaatatttaattaaggtagcacacggcacatggtaggtacttagtaaatgttcgcaggatgaaaaaagaatgaccaaaaccaagtattttgaccaagtgagaatagattatatcctctgaaccattaagttttgacacctcttagggaaataaaaatagcccttttggcataaatgtaggcaacatcatgaatattgaaaggaactttcaatccagagacctctgtgttgggcatgacacccaactagctgtgtgatggtagggaggtaggttaactcttctgagtttcagctaaacataaaatgttaaaaaataccttttaaagttaatgggttatttgtgtaaactaagtgatatagtgaatatgaaactacatttataaagtttaaaatactggactcagctaggtatttgcactacacagatacaatatatttgatcctcacagccgtttgtacccagcttacttaccccattgttctccaggagccaagatttaagggacagccctcctcaccatgtgctggcacaacgaaaggcactgggcacacacagataagacaaagaaaaaaatctttgcgattgattttaagcagctctctcccattagtgtatatgttttaaaggaatctgattctctttacatctagctgagtgactggccctagtttcgtgactgccacacagtaggctgttattaaatgactgttaaataaatcgataaataaatgtgttcatggtggaaggaatgaaaacaaacccagcattgggataatcgccccatccctcagacccagattagtaaaattccataatatgcaaagctgaagagagcaacagagtcgggcctctgaggtatgtgtatgttcctcagctggagccaaatcccagaccctggagagcatggaaagccacagttcaattcatgagaggacgtgccaaagcccaaccccagctgcacactgacttgtcggaaaacttaccaaattccctttcagaagggtttgctgtgaccactatcccaaatggagtgttggtcacatgtcagacttggacgccaagtccttgtccacagagtgtgggatgagcaattccatcctgacagatgtgatccctggagtgctcgaagtgacagtgtggagttttccactcctccagacagcgggcaaatatgtgctgatctgacttggcttaaacgaagacctgacagccttctcctctctggaagtgtcatctcaactggagatcagccaggatgtctttgcaagttgtgggttctcaactttctagaactggcgggggctgggaaatctgcagcattaattggatatgaacttttcattcctcctccaagctggctaatgttggtcaaaggcatatgatgtttaacctattttatgtctaaatggctacatagctcattacttcctaggtggctgccaacctttgcctttattgaataaacaatttttgagcacttgctatatgccacccactcttctagattctttacaagtgtccacttatttactgctcatccgctcccccgaggtaagtactattatttccctcagttcgcagatgtggtaatagagacccaaagaggctcagaaactgttcctggtctggattgttgcgggagctgtcgtgtcagctgaaacaatatttgatgaaagactgtgcactttggagaataaaatggctctgttcctcttcaggagtgagtcattctgaagcacgttctatggcatttaaaggatgaaggcaaggatgaagtggggaggtccgcaaggaaaagtacattgggaatattgcattcacatctgcacctttaaccaaggacagaggatatcaagggaagtacacattcatgatgtggtaggatcttttctcagattcaatcttagtcattttacgactagacctcaataaatcgcaagcatggtgtaacatatataaatatacagctagacataggtagatataaatagatagacataactagacaaatcagactctgatttaagaacaacttcctaccctttgttaactggaaaataatcagctctcatagatcctcctacacagaatgaaagggggttacttagcctatatcaagagtcccatttatcagcctttttgaaggaaatgccacaccccttcgagacacatctctccctataaagaagcagctttgcctttcctatttacccatctacccttgctgaacatcattaaaacattaagccatcatttaacctgagagataaaatttaaccctgaaaatgtacttccaattttttttacttaccagcttgtcacccacagctaatccctttcttccatcagaaacccttgtcaaaaactgatggttattgcatgctaatttcaccacaaatacctgatctgaattctaagtaattagcaaatcaggtaacctgtgagatgctgatctttttttataactacaaaaaagcttgtcacggaggatattttagttcaagaacatttccaatcaggaaacctaacatcgtgttccaaaataccacactgtattgcattcatacatttaggtgacatattgactgtggataataatgtacctttgcggcaatcacactgcattttgaatgtgcaatggcaacgaggtgtgcattatgtatgttttaccagtttgggcagctgcccataaatagggattagctattaccaaattcattttgtgaggttcagtttcctattgtgaatgaaaagcatttgtttgctcaactagaaatatgtatgtgtactgagaattttcattttgtgaggatctgaagatgggtacactcagatgataaaagaaaattcccacatagttctgaaaatcaaacgattgggtagtggaccctgggatagaagatgactcattccagttccttctctgcgatcaccaggtgtgtgacctcagtttccttacctataaaacaggaatgcaaataaacacctacatcaaaaggttgttgagaagaataaaagaaatgatgtgacaatgttatacaaacttaaatcaacactccacataagctctcatgttcctggcacgaagcactaatccaagaactgacaggacctacttcaaacaaacaaaaaataacagcaaagttgcataaacctgcttccattactgatgctcataaagcggttccctgtttatagatactagcttattaggtctatagcctacagtagtatacgtaaagtaactacgaggtgagaaggataacttttttataatttacaagttcatgttacattacacattttcacagcattgctgttttaatgttgaaccacatttcacactatagctatcttattgagctttaatattcagtaaatatgtttattcttattagaatttcaaacaaatataaaaatctctcgaaaaacagaattctgcaaatgttaagcatgaaacaacggcgaagaaggggactttgctgagaatgccatgagaacctgatgcttgcccatagctggtgctcagtgcctgcttgatgaagaaatggatgagtgaataaactatagaggtgataagaaacatagtggcaagtggagaatttcagaactgcatgctattttagagctatcataattgatcacagaaaagatggagaattctctgggaaatattagggggttatgaagagagctgtcttcacaaacgaagacataaaagtcacaatgcagagtgaacacaaagaaaattctttttatttcttcactgagacccaaccaatcatttgcccaatgaatgaaggtttcccatggaaatctgggaagaatgtttctggggcaagtaccaatctatcaaacccactttgcactggggcaagcacggatgtttggagacgagctcccattaaaagccaattgtatttcactgaagcaaaaggacaggggattgggtgcatttgggaggcggagggggtctgacaaaataggggtcatcttcttactcagaagcccaatatgtaaaacaggaaaaggctgagttgctctgactgaagcaatgggaggagagatgatgctggagccagaaggattgtggatcccatatgaagtctcaactccatggtcccccaagcagtgggaacactgctcttgtggactatctttctgaatttttttgagagctttacagtaatatagggcagaagagcagcagcagtcaccttgatccagggtttgattttatttaggcagtatgatataaaatcggaagaatttgcgttttggatttgagagacctgggttcaaatgctggctctgccattttccagctacctgggcaagtgctgaacctctctgagctcagttttgtcttctgcagaacaagaataagtaacatctatctcacagactggctgggagaacgtaatgaaataatgtatgcgcattcacatagcatgtgctccataaatgtcagttttctcctcttcccatcttttcttaatgttttattgttttgactgttcttatctccactactgggcttgggtgcacataactacaaaaatagaatctcaaaaaaaaagttcttatctagtatttgaatctttaaacagcaagcaacttagattgtagataatttgaagatgctaattacaggcaatttcttctcatagccaatatgaagtgcaaatctattagtctaaagacatatttatcttccccccgtgaaggccacttaaaaacagaaactcatggggtccaaataaaaatacaatgatatactgtggcaatagttcaataaattatggtataatcactatgaactgtatatgcagccactgaaaatcacgtttttgagccatttttaatcacgtggcaaatgcataagatatttgatgcaaaaggcagaatgcaaatatccaaaaatagaaatgtagatatatacacacgttaaaagtggtcctaaaagtgaatattttattgttattgttttctattccaaaataagcatctacttttgcctacagtcagaaaaaaacgaaaaatggccttaaaaatatttcacagtaaagaaatgatatagctgttatgatctgtaacgaatgttctttgcagtgtaatgtgtaactttcccctgctgtaggcatccatataaaagtgtcttggatcatcactattcccacagaaagatgtgtctggtaaccacatgatctggtcctcggtcctgggtcattacagtggtcatggtttcaaatgaactaaaacattttaaaaagcaaaagaagaaatatcttagtccgtattttaatagactttagccttgacaaaaggccacacacgaaagcacccacaagggctcctgttcatggaggagatgctgccagtaggggcatttctggtgctaacagtggtcttggtgagggactctaccaactgtgagtaacataagggggaaaggtgacagccgtccatggccctctcttttagccctgacatttaaaaataatttttataaattaatagaattctagatctggctcaacccaaaccagctgcctcttactacggctaaagaaaccaaggtaggaaaaggttaagtgttttattaaatatctatggacccacagttagcaaaagagccgagaccataaatgaagtttcccaacacacaatccaatcctccttcacttacctaataactactttggccagctcaataaatgggctgtctgtgaccagtttccagcttcttacaagtcttcaacataaaactggaaacaaggccactattactggggaatttggcagaacacagaattgttgtatgctacatttaatagggtcagagcaggtcttgccacctatgcgtcactcaccgcactcagcagaacgattcataaggtgcaaggacctgatttatgttgggtgataagtcaatgaatgaatcaatcaatgccaatggctccaagtggcaagagaaacacacttaacttagtaacacatcatgatttccttccatctattttagtggggtttttaaacattctacttgctgttttccagttaactatctatttctctgtttatctgtgtgtggatacatttgcatccatcagttactttagtatcaatatgccaaatcatggaaggccacatagaaattaaatggacaaggggtctgggtcccagagcagagcctaagaggatccgtgttccaggagacaccagttggtcagggcaaatagaacactagcgatcagcgtcatgatgagacggggcacctagcaatatctattcagaggcaagtcagttttccagaagacataaattctgccaggtaaaggcctcctctagagggcaggacatgtataaggttctggaatctgacaaattagacaaagcaagaaaacaccaccagcagccaacacatagacctgagtctaattgtcagataaaaacaattcaagattcgtacttcctactaaagaaggggagccgatgagggaagacacgaaattgagaccagatacgtgccaagcagggcacacaggtgacatcgaagcagtggtagctggtcagagaggagtcacagctgctgatctgctcaggggcaatgacaaattccacagagtttgtcacaggaaatctggtgtcatcttctcatctcaaaaccatcacacagctcgcacacaatcacacaccattcactgagagccttttacacacaaaggaccacactgagctcttaacatgccatttatttctccaaaaagattgttgcctgcatgatccacatagagaaacctaagcttggcttagatgaaaccacttacccaaggtaacacagcaagtgatatagagggatttaatccaaattagtcagatcactgagtctgggctcaataaactgttagatagtttaaacacctatgcaaccaaaaaaccccaaagcacacacaagatcttacaactggaggtttcatctctcaagagagtgtaggtgtctgtgcatcaatggtacagccaataggtgagcccaggtgtctcagtggcctgtatcaaaaaaaaaaaaacatgtggagcctgtagtcttaactacgtattaatgggtactttttctgactttgagtataaggtttcatcagcactttagagatattttccacatttgctgtctctctgtagtgtccaaacccataaattaccagcagcggctggcaggctgaaaattttcatatgtggtaagaccactctactccaggcttattagaaagattgggagtgaaggatctgtggaatctttaaaaagtaaaaagcttgtttttcctgaacaatcaggtgtcattgcttttttatcaagaatagtaacacaaacctaagcaatgcaaccattgccgtatacaggtcctgcttgtatgaaaaggctagaacggtttgcaattaggacagcagttgtatgctcttaaatacctacaagccctttgttcctgttgggtagatcatatgagctctggatgaacttgctccagcaaagccctttcctcctgagcaatgctagttacatctttttttttctcaacctctgacacagttatcacaaattctgcatcagtaaggtctaaattaacactatgttctgtaccagatctgcagattatatagaaggctactgttaagggctaaagagatctggaagctgaaagactgatttttgaaaaattaagagaggtatggagggataacagaaaaaatataaatgttccaggtaattagagagcactttccaagaagcaccacaaaattgcaagtgcccatcaatactaaagaatatcatgctgttgacagcacagcagagaaccttttcaaagacagatcggcagctttacccaaagcacccttcaccctgcaccacctacccctctcctgtggctccatcacaccctccaaagctcctactgagaagaaggcatcctgcttctctctgtaggttcccctagcaaaccccaaagaataaactgcgtaattgtgaaatacagaatctgtgtgtgaaaaaacacttgtttcattcttttcaccttcctgctgcctcaacacagggagtatcttccccacgtcaacaccacaccaggcatctgggggcataagccagttttccacgagatttgggctagaaatatttattgtggctgcaactccaactgtcatccattcggattacttcttgcaggaatcatagccccatcttctcaacagttcaaaagtggctgtgtgtatccagctcccctctttatttccagagcatttctgtgattttagagctgctaagcctcaccaaagtcaagtcctttatctaattccctcttttgatccagtgtctttatcctagaccacggccagtggttggtgggtttcaaaactctttgtcttttttctgtagaacttttaccctaaagaaattccattctaaatgccaatatgtaaaatagatcaaaggcttgattagaagagagttggagagctggggtcccaccaatccccaaggatggggaacctgagggttctgtggatcacttgagagtggaaacacaggaacatgactagggaaaggaggggttcacagaaatgaaagaggggcaaacaacatcccactttaaacatgaaagctgaaaatcttcaacccattcttagttgcacagggcatgtggaaatctcaaacacagaggcctgccttacaaacattaataatatctaccccttactccagacacttgcagagacctcatttaatccccacaactactatctgtggtttatagattttcagcttacagatacaaaatgtgaagcccaggatgatgaagtaacttgtccaaggccacatagacctaagtggcagaagtctgacctgagctcgatgtgggactctgaaacctttactcttaatgcatgcagggctgccatcaggtgcaagattttcaaactcttctgagtggggggcatcagcccaatgaaaggatattccagtatgtggaagagaaatgtagcaaacgtaaagactgatgccatctttcacttttttttttaaaagactgaaacatttcaagaactctttccttaagaggttactgaggacctcgatgaagatgcaagaaagacactgacagtattcacgatctattaaactgaccagtttctactaaatacctacaacatgcccaagcaccagaaagacacagatgaacatgtctcttggaataccagaataatttccccacgtcagccttgtgaatctgtttagagaggagggcccagggacagcaataggaataaaaacatgaacagacacagaacaggagcaggcagaagaacagaagaaaagggatgaggcaggagaggagtagttaatcttacacaacatttggacttttcaaacgtaattgcacatccattgacaaccgttatatcaccttatatttacccagtgctttttgtttgaatctcacagcagcatgatattataggaaggggaaatataaaaccaagttttacagctaaagaatatgtggcctcagagaggtcatctttccaaaagtcacagagggagtctccctctgttagagggagagccagagctaggatctggacctcaggactcctagcacagtgctcatcccaccacacagagcactacttgtgaagcagaacataccctttacatgttatccacatgttatccacagctacaatgcttgccagtggccagcatggtaataaagactccattctcatgtacatctccataattagattacttttccccatcctcatccccacaacctactcaccaacaattatctgagcccagctatgctcaccccttcttaagacctgccctctctggaattacagtagacaatgacaaagaagttgtagttgccagatgtctcaaactgcagtgacacacatacacaaaatcacagaatcggctgcacccctaatgcttctctgttcaaaatccagttcttcttgtaatgacatctaatcaggccctggaatcagctgaaacgagagcttctgtaaaaatcactcttcactcggtactcagcagttaagtctcttaaatgtcaacctgctaggaattactttaaaagatttttttttccttcattacaaatctcaaagctattgagtcttttcaacttccagatggatcctgatattcatatagtccagaaaatgacaatgttctttgtctgctaggtttgaacaattttgagttacttaaagaatgtgtccacattattacagacactcaggttaataataaacattgagatccttatccagatatttataagcctttagaactctttaaaggatgcaaataatttgaccaggattttttttttttttttttttttttttttttttttttttttatgaagaaatttctctacaaccaggactctggctaaatccattagccctacaatttggctatgtgaccaccaggtggtgacagtgtgccacaattcaggaccagcaaggttggcatcagggagctttccccacacttatgttgaaaaccaacctttcaaatttagatctcacttaatcccctgccacatttaaggtgttacttttaatacagcatctcaaccaccacctctgggttaggtccttcataatctgtagaaccgaaatcttttaatgtggcattcaggaccctccaaggtggtcccaccccacccaccactctcctacacagtccctgtattacagccacacttcaatgcatgtttcctgcacattcacacagatgcaaagatggttctaacatttcttgcttctgtatatttgctcttggggatatcccctgatgttcacctaccttttcaggcacctataaaacatctggaaacttgctcagacaaaactccaccaaacagttgtaaaagcccagagttctactagtatttaggaatatgctgagtgttgtttcctgtagaaaacttgtaatgtatatatataatatatattaaaaacatacatatatacacatatatacatacatatacatatatatgtaaatcattacatatatacacatatatacacgcgcgtgcgtgcgtgcgtgtgtgtgtgtgtgtgtgtatgtattttgagacggagtcttgctctgttgtccaggctggagtgccgtggcgtgatcttggctcactgcaacctccaccttctgggttcaagcgattctcttgcctcaccctccctactaggtgagactacaggtatgcaccaccatgcccaactaatttttgtatttttacaaaattacaaaatagtaattttgtaattagtagagacagggtttcgccatgttagccaggctgttcccgaactcctgagctcaagttatctgcccacctcggcctcccaaagtgctgggattacaggtgtgagccactgtgcctggcccttgtattatatattaatcttgatatttttaggataaataaaaacgtgtgtcttaatgagcgctagatcacataacctgccttatctacttagctatttctcttgaacatctttccttgtcattaaatgatacatgaagcgttttatggttcccctcaccaggagtctgctcagtctggtggacagtatgctgggcttgaaatcaaaacaccgagattcagtcctagttctagcaggtgctagctgtgtttgggcaagttgtttaacctctctgagcccaagctgcatgggtgtaatgcttacctcccaaagtctctgacagcctaaatgagatcactcatctgatcatttctagcttggaacctgccttggagtgacctctcaattattactcatttctatccactcagttgatgtgatttctttctccctccaagccacaccactctttgtaccttcctgtgcctccatcctgctggatctcaccttaaaggagcttgggaacttgctgtattccccctgccagagcataagaacactcctgaaggcagggctggcctgactcctctgactggccccagggatcccctagcatatgccaagtcccctgcagacgccaggcatctgtggaactgaatggggaatccagcctcccttcgccttaacccttgccattctgggccttgcactcttacagccctgtacacagcttggaaaaaaaaaaaaaaagtctggcgtcttttaaggccctggcttgacgttgatgctaaaaaatactttcaatctggagcttggctctttggggtcccgatgatacctctctgcctggtatcctctgcctacagcttctctcttggtggccagctctgcctcctcttctgcaggttcctcttctgtggcagcagaggataaccttgttaagtgagaggaagagtggtaccccctctctgcctcctcctcacacgggacgtaaacaccacggcttcagcagggagctagtccatgctgaggccttctccagcctttctagccttgatgtttctttattgttgtctgtggcttggtttcgtttttccattttcatgaaaaaaaaaaaaaaaaagctttcttttcttggcccttcttccagcagttgattgatttgcattggatgctgaagccacttcctgtttttccttcaaaccccccagcaactgtcttccttacaaacggcctcagaaaaaaaagaaacagctcacattcctggtacagggcacctgggaagaaaaattcattggatttcatcaggaagtatgatgttccttgggcagcatcccagggtggacctttctgttgaccctatcaggatggtaaaattgaaaagaacccccagaaggcagtcctcactctgcaggacacctactcccagaggcaccgtgtccatcataatagttctaagcgtgtgtactagaattggatgtgggtgtgtttacttctgcactgcctcctagctgtgtgacccaaggtgagctgctgtgccttgctgatccccagtttcctcatttgtcaagtgggttgagtcataagacttcctgtattggtttcctgtggctgcagtgatcaattaccataaatgcagtggcttaaatcaacacaaatctactaactgttctgaaagtcagaagtcttcaaatcaaggagttggcaggcttgtatttcttctgaaagctgtagggagaaatctgttttcttgcgttttctactttctgcaggccacctgcattctctttgccctttcttccactttcaaagccagcagtgtagcgtcttcaaatctttctcttcctgtttgtgtgtcctgtgcttttgtcattaaatctccttctttcactctgactctcctgcccgcctcttataaggacctgtaattacactgagctcgcctagttaatccaggatcatctcccaactcaaggtcctaactgaatcgcatgtgcaaggtcgctttccatgcaaggtaacagattgccaggctctagggattggggtatggacttcgctattttgcctgccatacttctctcataaaaccattatgaaaatataaaaagagcatatatgtgtatttttcagcacaatcctggcacattgtaagtgctccaaatatacagccatgattatatcaatataccaataccagcactagcagtcaaaagagaagtggttgttaatgcttagttaggtaaagcagagccatttggatcaaccttgaatgaaagcaaatggaagcgtaattggggctggatagtgcacagacacatccttttacagtttcatatcctcactcttcgttttaaaaacaaatgtttactgggcaccctctagataccatactttccattcctcacaatagtcgtttctggtagatgttaccgccttactttacaggtgacgacagtaagacttaggttacacaatttggtcagattgttcagctggtcactagcaaaggcaggatttgaatttgctattgtctgatttaagcccgccctctttccaggctccaggacttggcgacatgctggctcatactcactctgatcatcaaaactacaccagacctgccccacgggcagctggcacacttggctttcagggcagaaatcaagttcttgcttctccggtgtcctccacagccctacacccatccaggggcacacggtgggtgggctatgccatccttgtgatcttgctaggaacaggagagcccaatgagaggcctaagtgcttctggggcaatggttctcagccctggcatgtgtcacaatgacctggagagcctgctaagccagactgttggccccacccccagagttcagtaggtctgtatttgcatttcaaataagaacccaggtgatgctgattctgctaatccaggcccacaccctaagaaccacccctctgcagggatccggaagtaaatttattaaaggagaatacactgctcagatgtggggtattaacactcactggtccccacccactccacttctggacttctgcagagctgctagccctacttgactaataattcccagcagaggggcagtctccccataacctatgacacatcgctcactttcctccactgctcctggaggtggcccccattgggaatcttagctttactggctacatctttagcagagaggcctgggtcatctgtcctccctgtatcttcagctcagccaaacaataaaatgcaagacacaaaacgttgcctttgaaaatgaggcagctggggagaggaacgatgcctttaaaagggcaaaggttctttgggacaccgatcctcaacatctcaccctgcagctcaaagtcaaggcttgccagggttcaagttctcaagtgtgcttcagtggtgttatttagatgtgaccctataggctgaagggcatgcacattagcatattttgtaacagctgttgatgaagatgttaagtcttgctcaggggaccagttgcagtgagaagcattttatgagaacaatatatattgtagacatctgaatatatttccatgagaaaataaggatgaagaaacaaaaaaaaatggtatagtgtccttacacagcagatgaatatttaatacactggagcttatctttaagagaaaaaaataccctttgcaatttttcatgcttcctacaatagcaatccatatacgaaatgacaaacactatagccacccatataaataccacgtatttcattattcctttcttacggtggcacaaaggccagctgctacatgaagtatcatgaaaacataaattagtggttataaatagcatatttaaaggatgaggccatctaaaatcggttggcttaacagaggccaagaacaagtctgaggaattgataagacaggagggaaactcaggtagtatatgcagatcccaggacagcagcccacagatgctccaccaggggctctcaaaacagagttcaagggggataggtctcagggccccggaggaatgatcctactttcagttgacccttgccacctcaggagggaccaattcagagactgcttatcaccactatttttaacttcttggcaatataaccagtacaatgggaaaatcgcccaaagtaaatacatactctcctttgattcttctcctggaaagcagttttctactattttccgttagaatcatttccagggtaaatcacacttcagaggcagagcttaagtctaagggtcccctaaggagcatgtatcctgggctgggaggagctaaaaaaaaggcatgtctttgctctctgctgtagatgctgtgtccaagcaagtcctttgagaagcctctgcaagtttttcaccttcaagcctcctgcgttattactatttcctgagttttgctaccaaacaaaattacctgtagtcatatataattatttttccatgagacagcttaatattgataacatttttgtggtttttaaattttattttatttttccttttccatctctctttcctggtattaataacatttttgaacattttctttctactaggcactgtacgaggatcctctcatgtaatcctcatctcaatcctatgagctgggtaccactattacccccactttatatacaggaaaactggatcacagcagtgcagtaacttgctcaagatcttgcagcttgaaagtggtggtacaaatctaaaatccagatctgtcttcaaagtccatgcttttaaccactgcactgtgcagcctgaattcatccattcaccatattatgttaatacagttccatattaaagagaaaactgtttaaactattttaaaacttaggaaggataaatgcataacttgtgttggaattttttaagcacataaaatagtttcaggcaacccattcaggtcttcatggacccctagctgtcctggacctcacattagaaatcactgacctagacccacctgaacatcatttgccatgtgaatcttctaggtctgcacaaaacacctagttaaaaatatcgtctgatgctctggaataacaagtcaaataaaatcaaaatacggaatgacattcaagcctctttttttgagtgtgtgagatggggtcctgctctgccacccaggctggagtgcagtggcgtgaccacggctcactgcgacctcaacctcccagattcaagagatcctcacacctcagcctcccgagtagctgggactataggcatgtggggcctgtgccaccgtgcctggatgattttttgtagaaaggtctacgttgcccaggctggtctccatcaaggctctaattaaactggtccttcctatcttttcagatccatcttccagatctgtggtatgcacactgggtctgaatcagcaggtgaggggcctgggaatctgtgcttttagcaaactccccaggagacctttattggcagaaattttggaaaacatttccatcctgttcctggccattcacaaacatggtaactctgacctcctggggcaactcaccatttacaaggcacattacctactctctcagctttctgccagggctcaagcccattctccagcctgaaatgtatgtctcatgctttcctcccaggcctggctcaaaggtctcctctggaaagccttctctgctggcttctgttagaatctgtcacgtcccccctgcccccacaccacccagcttacattctgccttcttccatagggagccatttcctagtttcacccagtaagctctttaagagttaggctggttcttactaaccttggcttccccagctcttagccaaccactggccatagaaaattcttaataaggatcagcagatttaatttgtcactggcaaccgcaagtagccactgttctggaaacagacttctcccttctcacgcagcttatgccactggcaaaagaggggcgggaaatgtgatccaggattaataatgcacagatgtttctcaggaagtagtatatcactgtgtcaaaacttcctgtcataaattctgacaaaatattttagtatttgcatttgtcatccttatcaaccgctctcatacatgaaatggagcaaatgactcctgagcctgactacaccttcccaggctccagtgtaaacctcagccatacaaccctacatttttaccctgcatctgttccgtagggaaagagaattttactgattgccagctaatgtttattgcatactcactatgttccagagactaaagcctccattcttatgcatatctgacccgcataatggctctctaaggtggtattaccatcattttctacatgagagcactgagcccagagaggttaaataacttgcccacagttgcacagctagtgaatttggggtttgaacccaaatctgcttgactgcaaagcccatgttcttaactattctactggtttttaaataacaagagcctcatgatttcacagggtataaacaatgacatcaaaatagaagtgaaagaaggaaagtctctgggtctatactatggctagccggaaaacactatttcagcagtaatggctttgcatcacataagttcactctgtctagagcacagggatcatcaggcaaaagtcctggtgggcaagcacagcacttcaagatgccacgagggctgtgtccatggtcctgaaaatttaggaaaatttaggattcaaatttaggaaatagtacaaggctgcccagcccagtcctcaatgagcacaaatgccaagctgcctcaagggcagagtctcatgagattttacaaaacacaagggccaaggagactagggagttccctcacctcattttctcattttaaagataggggccaggcacggtgactcatacctataaccccagcactctgggtggctgaggtagaagaaatgcttgagtccatgagttcaagaccagcctgagcaacatagtgagatcctgtttctaaaaaaaaaaaaaaaaaacttgccaagcatggtggcatgtgcctgtggtcccagctacttggaagggctgatgtgggggcgtgggggattgcttgagcccgggaggttgaggctgcaatgagccataattgtgtcactgcactccaacccgggacacagagcaaaacccagtctcgaataaaatagaaaggaagatgttgaaactgaggctcaccaaagttatgtgtttgcccaggccacagagctaatgagccacaaagctaagtctcagacccatatttcttgctctgagttgggcttgtcttctttccttaagttttatttcttaatctcataagaaaatgtcacaagttattgtagcagtgaaacaatgagggcatacacaatgaaaaaaacctctcctatctcacgccaaccacaggcttctgccctgcaaagatcaccaatgtcaatagtttggtaatacaccatcataaaggttcctaaattcatctctatatctacaaacacacacacacacattctttctttaacaatatggagtacatagacatttatttactttgaatattttagcacttaacatgtgttgaatatattcccacatcaagcagatttagctctttcttattaaatgctgccccacacaccacagtcaagaggttgcacatgtgttcaaacactctcttcttggtagatagtcagactatttggtgttccttctgcgaaccgccctactgtcatttaagtaacaaactctgttgatacaggagtggcctctaactcatttagtctcctgtggatcaaaataaaatcctggtctcctaaatgggtgcggctgggagatcacttgcttttcagagagtagtttccatttcctgtacatcagatggtcagccctttaagcatgccaatctgcaaaaagaaaatatttctttttactttcatgtttcagagatgggatcttgctatgctgcccagattgatcttgaactcctgggctcacgtaatcctcttacctcagtctcccaaaatgcttggggattacaggcatgagccaccatgcctggctaaaaatgaattattcttatcaactgcttaaaaacatgcttactaagccatatgaacatgggcaagctgcagtttcttcaactataaaatgggaaaataataacccttacagagttgtgtaattcatagtaaaatgagatgacacatataatgtgcctaatatgatgtcaggaacacagtaggcatttagtaaaaatgactactattattattgttgttaaaattacggcatttatacactaacaaaagaggtacgcaggttttaacataaatgttcatgctttatatgtcctgacttcaaattaacatgtaactggcctctggaacattcactgccctacctacatttattgaatgcctgctctcataggtcgggggaaggggatggcaaagaggaagcaaacaggattggttggccttaaatggatatcgatgattgaagatttaaaagacattgaagacaaaatccctacacagccattcagtgtttataacgcaccttctgtgaagcgatggaaggagttctgatgtttaattctagaacttttcagcatccacaaataatgctacttccagcagagaagaggaagatttgctgctctgagttaaagctagagaatccaagtgagcacaaaggcacttcaaggaaaatgcaattagaaaaacaggtgagtggggacttgggtttccagaaatgcgtgcttagaaatactgacaggcttgggcttttcacccgagacgttttacatctttaaatatgtttgtaatttcagtggtctgcacactccagattttgttttgaaagggaaactttataaatcactgtattattattagaaataattaaactaaaaactaagatgtggttgcacacatgtttacaacgatgtgaaaaatacggctgtcagcaccagggcccagcttccatcacataactgttcgtgcgttttaatggacatttgagtgttacaaatctggccagggtgggagtcaaagagaggcataaaattatataataagaataaaaataaaaataaaaaacaagaaaggaaccggaggccggtgcagttgctcacgcctataatcccgtataacccgagccctttgggaggctgaggcaggcagatctcttgaggtcagaagttcgagaccagcctgatcaagatggtgagatctcgtctctactaaaaatacaaaaaattagccaagtgtggtggcatgtgcctgtaatctcagctgctcgggaggctgagccaggagaatcccttgaactcaggaagcggaggctgcagtgagccgagattgcaccactgcactccaccctgggcaacagagcaagactccatctcaacaaaaaaaaaaagaaaaagaaaaaagaaaggagaaaaagaaggaaagaaggccaaaggggaagaaatgaggaagggaggcagataaaaaccttccttccattttcttattcttagcattaaaaaagactccaagtgttacactggaaagtgtgtttaaaatactcggattctaaaaaagagcaaagaacctaatgtatgtttttcaaaatcctttgattctaaatccattcaactataaatctgagttattactttgaaagctagctacatcctgactttcctaaagtgatacaaaatattcaatcccaggccaagaaaaatcccaaaccaaccaacagaaggcaaggaaaattgaatacagaagcttgcaacttgaattattcggatccaaggaaattaaaactctttcatcctttttccccagttaatttttaaaacattttaaatacattgccctaaatatttgaaaatataatctgaaagtgctcaaattctattttatgagcagaaaaatatggataaatatatcaattttatctagaatgctcacagccatttctttcaaggatattggaaaatactggtagtgctgtgtctactaaaacacttctaaggcatcagaggaaaagctttttgatattttgattgatttaactctaaaataaaccatcaccccaagattctttttaaaaataaaagatactctatgtgaagaaacaaaaaatcatgcaattctttcaatatatacacaaatactaaaaaggaataaacaggttgtgagttaattacaaaaaagaaaataagcttacatataaatgacaaacaacctagcaggagacaactgttaaatggaaacatgacacccatggcaagtccttgaatagctaaccatatagactatacccgcttttgaaaatatcttctgatggggtaaaatgtattgctatatctaacccattatttaatgttttaacatgacccatctacatactttttcctttggtacaaagaaaatctaaacacatgcattcttttctcttttgtggattcaaaccaaaataaccatggtcacatgaaggatgcgtgatctcctctgccgggatgtaatatggacccgaggacctcagcccacagctctgcctcctcaggttcttttcaaggcacctccaggattcagtatctccactccatagagggaagcagcatgatttagcacagcagttcccacaagtgtggtccgtggtcccttgcaggggtcgactcttccaaggaaacccatgaggtcaaaacaattttcataatactttgacaaatagtagagttttccaggggttacatgatgtgtgataccaccacacactgaatgcagaagcagagctgggaatccagctgttttctattaagccagacataaaagagatacgcaaaaataaaaaagaatgccactcttctaactggtttttgttttggaagatttttgtttaattacaatatgttatttatgttaggatgcaatgggtttataatattttaaaacacatgtattttaaattattttctctattttcagttcttggatggtaagtatcaataaatgtaattcacataaacaaaaagctctttaagatcctcaataatctttaagagtataaaggggtcacgagatcaaaaagtttgccaaccagtgatttagcataacgcctgacatatagtaaatgtgtggcaaatggacaaactgatggattaaagggttttaataactgctttcaaatgttcagagttcaataaatgaatatggccagtaaagatctttggataaccatcttcaggtcctccacacctgcttacacatgatttaaaagcaaatgatggtaagaagacaaaaccgtaggctgggtgtggaggctcacgcctgtaatcccagcactttgggaggccgaggtgggcagatcacctgaggtcaggagttcgagaccagcctagtcaacccagtgaaacccgtttctactaaaaaaaaaaacaaaaaaaaaatagctgggtgtggtggtgcatgcctgtagtcccagctaccgaggaggctgtggcacgagaatcacttgaacccaggaggcagaggctgcagtgagccaagatcatgccactgcactcgagcctgggcaacagagcaagactccatctcaaaaaaaaaaaaaaaaaaaaaaaagacaaaactgtagagcaacaattactacactgaagataccagttaagtatgacttaaagacaagtaaagggaggatccaggtaggtagcagtacaaatacgttttcatcatcaatggcttcatttatccatcctatcactacttatttccatttcagagaaataatatcttctacgaatttggagaggatgttgttctaaagggttgtatgagatttaatacaattaaactatgcaacatcttacatggttcagtgcttataaccctacaaggttatagggtcatttgtgcggaccaattagttaccttgctgtgttctgcggccacagtgttcacaactttctaccaattttcttcctggcaatatcttattcatcttgcaaaatccagtttggacaacacctcttccaaaaagctttccctgaattcttcttttaaagagacagttaaaaattccttcctctcttacctctgtatgttgtgcctatgtctatggtaacacattctattgaaattctgtatttttgctgtcttccttactagaccatgagcaccttgaaggcagggcctgtgggttgcccacttttgagttccagcacctagcacactgccaaacatggcagacactttaaaaatccacacaaagaaaggccaggcgtggtggctcacacctgtaatcccagaactttgggaggccaaagcaggtctcctggatcacctgaggtcaggagtttgagaccagtctggccaatatggcgaaacctcttctctactaaaaatataaaaattatctgggtgtggtggtgtgcacctataatcccagctactcgggaggctgaggtaggagaatcgtttgaacctgggaggcagagcttgcagtaagccgagatcatgccactgcattccagccagggagacagagcgagattccatctcaaaaaaaaaaaaaaaaaaaaatctagtcagtcaccttacaggccaataggactagtattagaattaagtaaaatgctaaggaatactaagacaatagtaacattccatatgtttccggcccagtcagaaatccagcatgtgtgtcttagtgagttggtcttaacatgtttgagaatgaagggtagccattctaccattaaacagccactaaagagagccctttcctaaaaacattatctcctggaagaacattgagctcttttcatccttctgaaacgatgcaaattgcaaatggtaaggcaagaatttcaaatgataaattaaaccaaggtaaaaactcacaaagcaaaaagcagcactaaagtgaaaaagggtcaattagcagaaaatgaccagaaagggggaaaatgtgacaatctgggatgcttatgggacgtcaaagagggtttgaaattcatgctctgaaattaatcagactttgttgccaccttttcagtgacatgcccatcagcaaagaacaagcattgtcattagcagaacaaagaaaaaaaagtgtatgcctaggattagctttggcaaaaaaaaaaaaaaaaaaaaaaggataaagtaggtcatttccatgttcagctttaagaatacggccatatggtaagaattaagatgttgcccagaatctaatatgggagagatgtctgcatactccaaaagaagagagaaataccaaacaccagtagcactagagtggaaatctgagattgggtaactaaaggcaatctaatcttgtgaaaagctacagagaggaaaggtcttgaacataaagagcttgtcctttcttacagccatccactataattggatgtatacccttttgtgagactttgaaaatagcaatttatttctcattcattagcctgatttcaaaatacccttaatggatgtctcaattacagagactccaaggtcatataacacccagacacccttcatatctgttttctttactgtattgtaactcagttttccttattagaggtagagttttagccaagaaggaaatctcaccatggaactacagaatgttaccagtgaaagtctctctaggaattgactaatctaacctcagccactttaggaaaactgaagcccagagaactcaagttcctcgcctgaggtcacacagctcagtatcatcaggaacagaccagtcctcagggtttccttcctccacttcagtgttgttgccatgatagcaaaacaaagtagtgcagatactctttcagaaatgtgcgtttggaaaaattgctagccctgagcaccatttcctctctacataaataaaagcaatgctttacacctgctaccatcaccctgggaacatccatggtgtgtgagtttattccctggagccaactgcaggaagatggaagacagagcatcgcatgaagccacagtgctgtttccagtaggagaaaggttagaatgaaccatgacaaaggcttgaaaaggagcttgtggtaagtttaaggagaagtagaatatttcctagccccaaagtatctgttggttacaaagggaaacacagtgactttatagtggagatggctggcagacaccaccttaactagggaatcagatcgaggttcacatcaccagaaatgggacagctcgatggcatgacacaatataccaatgatatgatatgttaaggagagcccttcacctctgtgtggtgctcttcccctaaatccacaggctccctttaaccaggagaaaatgccagagaacccaaattggggggccttctataacgttcctaaccaatgctcttcacagggatcaagatcaagatcataaacaacaaggaaaaccaaggaatcatcacaggctgggggagactaagtagacaacacaactcaatgcaatgtggaatcctagaacagagaaaggacgctggcagaagaatgagtcaatccaataaggtctgtaggtggtggcattgtgccaatactaagtttttaattgataacttgtaccatggttacagaggttaactttggggcaagctgggtgaggagtatgcaggagttgcctgtactatctttacaactgttctgcaagtctaaaagttatttcaattttttaaaaaatgtggccaggcatggtggctcacgcttgtaatccagcactttgggagggcaaagtgggcagatcacctgaggtcaggcgttccaggccagcctggccaacatggtgaaaccccatccctactaaaaatacaaaaattagctgggtgtggtggcaaacacctgtaatcccacctacttgggaggctgaggcaggaaaatcgcttgaacccgggagggagaagttgcagtgagcctggatcacaccattgcactctagcctgggcaacaagagtgagactgtttcaaaaaaaaaaaaaaaaggaaaaaaactggctcatggatggacagagaacagagctgaagcttttccctcctttcaaacccttgttagaatcattcatatatcactctttctttcaaaagcagtttgcactagttcttcttatcctcatttattctgattttttgtgtacccatctcttaaaaatggtaatgttttaatgacaaagaccagggaataatctttatcactgctaagagcaccttgtcctgtgtttttccacaaagcaaatgctcaataaacaactctgctacatgaatgaatgggttacaatcaatagtctcatgtcctcctttcatacctctcttcccagcaattttgtcagacagacacgccttgtctaacctttcccatccttggaatgggaaggcaaagtttcctggctgctcccacacacctctgccctaacccagtgatcctctcctcatctgttaattcagagggctgaactgacacagagccatctcctatcaaagcccagttcccatgtccacagaactcaaaaacacatctctgaacagctgatgtgagaatgtacttgcttcccacagatgagttccacgcattgcactgcatttcacaattttgccccatcttcccattccataagttaaaacataaaatttgcatttgcaaccatgtgtctatcccttcacaacacactccccttacacactgaacgctgagaagcaatagctattcacatttccctgtgctctttgcctagactgctcttcacctccttttcagtccagaaaaatggtcagttatcttcccaaacttcacgcattacatcatctcctccaggaagccctccccagacacccctcaatttcccccctaagataagtctctttctccttagaattaaggagagtctctctttccttagaattaatcacttcctgctctgtggtacctatgtacctggtatgaaattctgtttcggtagttgtaacacttaatcttaatcatctatacacaaccatctcctcaactatcacaggagctccttgagagaagtaactttgctttatttattgtatatacttcgccccctaggggagtacttggcatacagtcagccatacagtaaaggtttgctgaatcaaaggactgttaggagactgttaggctgggagtgatggctcaaacctgtaatcccagtgctttggaaagccaaggtgggagaattacttgaggccagattgttcaagaccagcctgggcaacatagtgagacccctacaaaaaataaaaataaaaattggctgggcatggtggcatgtgtctgtagttgttgctacttggaaggctgaggtaggaagatacctcgagctcagcagttcaaggctgcactgagctatgattgtcccactgcactccagcctgggcaaaggagcgagaccctgtctctcaaaaaaaaaaaaaaaaaagaagaagaagaagaagaagaaggactgttacttctattctttggctcctaccacccaagaacttatcaaggtggcagacacatggaacatgcaggcgttacctggaacaaatgaacccagactgcaaagctgtttcgcaggtccttttgcttgttgcagagagctcatggtttggatgtgtccctctgtaaatgaggtttcagcacactgatgaagcatgaagtgattatctgctgacactctgatttctctgagcctctgcagcaaactaaatgatatttagcctccagacctgttgatcccatctttttttttttcctatgagcattaatgttcaataagaggacaagaaatgaatttaggcaaccagactggcaggatctctatacggctactcaagtataaagaaaaagtgaaatcttcccagaatgttctcatcagaaactccatctctgccaactctgtaatcagagtggttttccttgattgccccgacattggcaaaaccttaggatagctcctaaacttctggccagccacactgctatctcactggtcccccaaactagaaatcttagatttgtcagtcactgaattttctctcttttggctcccacattcaagtgaaaatctcatgctattgatcatgcaacaactgaaataacctaaactaccactctgttccattctgtggcaggactcaagttccagcctttgatgccttaattctagaacatccctatctgcacctcaggcccagcctaatctcatctcttccccatggctctgagggtctcctcaggagaaggtcgtcggcagtcacacacccttctctctgatctcttatcacacaggcaccatgaaatgcccagaccgagacctgcattgctgccattatttttccctggaatgccccaccctgtttctctactggataaactcctatacatccttcaccacccagctctaaagccacagtggttaaccttcactctaagaaaacacatctgattattcagtactcaatactaaagttctctctgtggctggctcctcctaaaacgtgaaaaattaaccacttatgatttgtctgcaaaatacaatctgtttgttgaatttaactatttaactgctatcatttaagccttcatatgcatctgtcatgtctttgattagactacaatttcttccttgctcagcacactgcaacctagggtcatctaaaaagacatgctggttaagtgactaaaaagcaaacatcatccagtatcagccccaggattatccctgtaattctaagaccctgatgtgcatcagaaccacctgaaaagcttgttaagaatccagatgccctggccaggcacggtggctcatgcctgtaatcccagcactttgggaggccaaggtgggcagatcacttgaggtcaggagttcgagaccagcctggctaacatggtggaaccctgtctctactaaaaatacaaaaattagcctggcatggtggtccatgcttgtaatcccagctactcaggatgttgaggcaggagaattgcctgaaccggggaggtggaggttacagtgagccaagatcatgccactgcactccagcctgggcaatgatgtgagaccctgactcaaaaaaaaaaaaaaaaaaaaaaaaaaagggaaaaagaaaaagaatccagatgtcatggcactgtcccctgggagggtctaccaaaatctgcattttccaagaagcccccactcctcccagttaactgtgctgctcctcaaacatgaaaactactccttcctactgtgggtttggtgagctccagtgccctgcttgcccttcgggctcactctgtctggagtcagaggtcagaggtaaaatcaggaggagtcactaaagaagaaaaagttcagagccctctgtgctggcttctcttgggaaatggctcccaatcttggaggcagctgagaggtgattgtatctggagagcacacggactacttatctgctctctctgaaatgccagtgagtttgaaaggcactttgtccaattagaagtgtggagaaatattcatcctgtccatgacaaagatgaagtgcttctttcaaaagcggcggtggcaggctgccaggtttaagaagtccaactattccacatcgagccagcagttattaattagttttattagtggcaggtccttaatgcaaaatgacagagggagacagagaatatccccgttactactaaaatacaaattgtccagatttaggttgtgttgttccccaacatgtacaggcggcccgccaggcccaagtggggaacggagaaggcagccagatgcctttctgcagagttccggactattaatggcatgacaaagagactcggatccttacctcaggtagctctcgagaggaaaatccaccaattttaattatcaaggaggaagagcctccagggggaggatagggagatctgagggaaaaaccaagaggaggaggaggggtggcggtagggatgggaagtgggcccgtgttattcacgctgttcaacacggcctctgcataacagcctcttccacagggaacagcgcagggctactttgctgagaattagtcttacactgtcaaccagttttttatgaccattaatcacatttgtatttataagcgttaagacaggaaaatcaaatctcatgcttcaaagcatatgtttatcaccacaggcataaaagggaaagaaaaagttgacaagcccgcactgttggcaagagctgctgcgtgtctggtggcttccccagaagcaccctgggggctctgaagaacgttttgtaagggagaagacagaactgcccagtgcctcactttgttaatgtttctccttctttctgcaccagaaattcctaaggcagaaatttaaagaagttccccaacatcctctccctcaaccctcccctaacacacccctgaactccctgcctcagacctgccaggccttcttcctctgccccacaagacagaagatcccgacaggctttgagtgatgttgctctcaccacagcttttcttttagcagctggcatattccctgtcgttcccccgaaatacccaatgacccaaccccaagctgtctgggcttcaaagaggtttccccacccgacacacctcagggccaccttcctctagatgggagtggggatagggaaactctgcaaaaggtcagaaagtgaatcgtctttgcgggccaaaaggtctctgtggcaactactcaactctgccattgtggccccaaagcagacccaggcaatgtgtcaacaagtaggtgtggctgtgttcgaataaaactttatttacaaaaccaggctgtgggtgggccgggtttgacccaccaacggggcctagtttgctgacccttattctggggcagcagtgcccaatctaagaacccaggtaccagtgagttctgcaaaactggagggaatattttaaaaattctaatggaaaacgtgcaactgtcttcatcacaacagcacaggctaacccggatctcttggctggaaccatatgggccacctgttttaagagcacctacctcacattgtctgagtaacaactaggaaataatcattaatgatttaaaaataataatttaaataaataattaaaaaatcaaaatacagctggatgatcaaagtctttcaaaacatgggtccacaatggagagagggcaggtgataaaagtggccccactggtcctcttcttcctttgatagcaaagaggggtctcaaaaacgtctaacgtcacatgtttcctaagagattccctcaaggagctcaacacacttttaatgaagtagaacatcatctcctaacctacgagtgaccaaggtcagggtgaaaaagccttacccccactttcaatattaagaactaatattgcaagtactcaccgaggaagaaaaaattgtgtaagctcatcagaaccaagggcattaccaacccactctcagattttctagaacagtatgaaaaaatacacagcactggggaaagaaaataagagcaagggggatgcaagagcaaggagcccctgcttctcttgctgagttgccaggtaagaaacagcaacccacgagcctaaaagccatgtcttcttcatctttgaccccttagtgtttaacacagtccttaaatgtcccttgaataaacgcatttttacattcatgatagacattataaaagatttaaaaatgaacatgagatgatctttgccttcttaaggttaatggtaaaataatggagaacgacaaaggagaaagacataaataacatccagtgcctgtatccacgcactctatttgctggctcccactcggcagctatgggctcttgtttttgagaggatcttctccagcctgtctatctggtttcccacctcctagctgctctgcagtagatgattcaaaggatggctggagaaggagccctgtggggccagcacaatgtcaatatcccagcaagaaggagggctgcagcctccacagggccccaggtgctgaagacagaacagatatctggccaggtgtggtggctcacacctgtaatcccaaaattttgggaggccgaggtaggcagatcacgaggtcaggagatcaagaccatcctggctaacacggtgaaaccccatctctactaaaaatacaaaaaattagccaggaatggtggcgggcacctgttgtcccagctgctcaggaggctgaggcaggagaatggcatgaacccaggaggcggagcttgcagtgagccgagattgcaccaccgcactccagcctgggtgacagagcgagactctgtctcaaaaaaaaaaaaaaaaaaaaaaaaaaccacagatatccatcattattccagcattatttatcatggaaaaaaaacaataccaaactgcaaacaacctacatgtttgtcaatagggatgaataaattaatacatgtctacaccaggtgaaattttgcaatttttaataaaaagaataaatgagatttatatctattggcctgaagtgaagctcattatatcttttaaagtttatctgttcctcaaactccaaaagcctggtgaggctaattctcatgcttatcaataaaaattacttttctccgtcaattagtatttggtccagaaaaaaaaaaaatcagtgtgtcttgctgtaagaacatcagtgtgctcagagctaaaattaggaaacacacacaaaaataaaacctgactttacaaggggcattttcctattaacaaaagggacaccaataagttctataaaattgattgttttacacggtgcatggaaagcatgatgttgcatagaaactaaagtgatatatgtcctgcataaagtgaggcctacctttaaatatcagaagatgctttcctaaaaaataaaatcatgagatagattacataaagagttcaaaggacgctgggcatggtgggtggctcaggccaataactccagcactttgggagggcaaggtgggcaaatcgcttgagcccaggagtttgagaccagcctgggcaacattgcgaaaccccatctctacaaaaaatacaatgggagtctaagggaggctatgggaggctaagggaggctcaggtaaggaggatctcttgagcctgggaggcagaagctgcagtgagccaaaatggcaccactgcactccagcctgagtaacagagtaagactctgtctcaaaaaaagaaaagaaaagaaaaaaagaattcaaaggagaactgacatatcacccagtgggtatattacagaatgcttgcatgtatgtgtgtgtgtgtatggttttatatatatttatataaagtataaatgcttttgcttatatatatgaatctcattttcccactggctttccttaaaaactaaacaaaacacaaacaccttactgatcgttagtagctcgtaagctgatttttagcctttcagctgagaggaaatggtccaaaaaaaaaaatactaaatgcatcagggagatttttcatacattcacatttccatgtgggaagcagcattatatagtggaaacaacatagtctttaaaacagaagagatttgtattgaaaggctggctccaccgttacggatttgggcaaagctctgaacctctgtttcctcatctaaagataggaatagctgcactttccttgcaccatcatcatgcggaatggaaacactacacatgaagcctctggtacaactcttggcagagtacacactcaggaattgtcatctgtattattatttcacaagctgacattttttaaaggaaagcacacctaggctgccatctccttgtagcaaaaaaaaaaaaaaaagaaagaaatcagttctgatcaagggcacatctaatagttgagagtgaaatgtgaaatgggaagatgacaccaccacacaaccagccccttcctcattcatttagatgtgtcccaggacaccacaaggctggctattgtacttcttaggctgtgtcaaaaccattttagtcaagcccagtgctttgcagataaacacattgccaacctttaaaatattcatcttcccctctatcgttccttccaatggaattgagacactgactgcttattggttctcccttcccaaacaataagaacagtaaagtggtactcatgcagacgcagcacacatagtaatccaaggacaactctgtccatcaaggaagcttcagcaagacccaaggtaccaatgggctcatttatgattctgtgtcctcacattctgtagtctcgcatctgttctgaaaatctgatggtttataaaataacaggaatatttaaaaattaggtctgtagagtgggataggtctgaatgtcaaatactattgccattcaagcttcgcttctctaagaaaagcctgcctagaatgaagatacaactgctgtccaggcttaatctaaaccttgcttaatggtgcacaaggtacttgggttgacagagctacgtgtagattttaggcggtagctctccatagagcatgttgcatgcaaacagaggtcgtgtcagcacatgtcacccttaaccaacacggtgctatttaagtaagtgccaacctgcagtttcagcaattgtgatttattgagaagggtggtgtgaataatgcggaggacttgaccattggcctttaattcctctcatttagacaggctgctcttcgctataaaatagtcattctgtaaattaatgtgttttattttaaaagtgacatgttgtactggcttatgcctaaaggcaaattactctggattgccagtttcctaaccaggctacaagggatccagcatactctacccagagtagaggaaaaatctatacaatcagtaaaagatgacaatatctaccatccgcacccaagacccaggtaccccattcaccaacaatgacatacctgctacaaaataaggggtacagtgctcagtaactgaggacctctctgcagctcagcactgggctctgcctcatctaccaggaagcaccccaaagacagtgtctgccacaattcactgtggtctacactgccctgagacccaaagccagtcaggcagtgagtgagtctattgctttcccttggttagcaatgaataatgatttatggaatagattataatgcacactgctaccagtacacatcccaacctaccatgctcctcactgagtatgtgatttgtttcctagagacttgagttcacctcccagctctgagactctggttgtcagagagttccagtgagacccttaacatctcagtctacattttctaatctgtgaaacggagctaacacttgccttacagggctgttgtgaggtcaaacagacaaggtacctatggcagtgattggtcaacagaacagtgtttgcacatactagttgttgctattcctattatcttataactccttggcacgaaaccttcaacgactctctgttatcaagtgaataacaatgaaactctagcccaacaatcaacgccctcaccagcccctattctctctcctatatctttcaaactcccaataggaaccatctattccaaatatacgtcattttacttatccccgaacacatgatgccaattcctacccctcacactttgtttctaccatcctgaaatacttgtacttctgtcttcagcaaagcttagcctatctaaattctatactttcataaaacaataatatatttttagaatctatatgtgttccacaagaataggcacaagacccagtcctaccactgggtgtactacatcccagccctgcacaaagttatactgctgcagggtggagaaggaggtgtcacatgaaccagcctaagctagtgagtatttttttaaggattcattatagaaaaagttagactttttcccttaggtctcttgctgtagaggaactgcctgtgaatagagaaaagccaacacaggaacactttgactccctggatccagcccttcctgaagtttgatctcctccttaaactttctagttatatgagcccattaattctcatctttacttaagatagtttgagtctgtttttctcatttgaactcaaaagagctatgaccaataccaataataataatagcagctccatttgcttatgaagaaacatcatgttaattgctttacatatgcaatatcctaacaattctgtaattttacagttgtggaaattgagacccagagaggctcaatcattttctcaaggtcacacgaatagtgacagtgtcaagtgtcaccagtcccagcttaatgcatttccaccatatgccaccttgagacactaaccttagcggatggctccaggggcacgtaggaagggttgttgctcttaacgcggcccctttttcaagaattgctgtagttggaagcagctccacagtaatttcctatagccctggggagtatgcttttaccaatggcacctctagatgcccttcactctctcttgcagcagggccaagactgataacgaatggcccgtgggaagcgcacgaagtccaacgtgaatcaacgatagcactaatgaaattgcttcaagttctagagcagaaggtaaactgaatgcctttcagagacatttgaacttgtgcccttccaagttcccagagaagaaagaaaatgcacatggggtgcaagccaagagtaggaacaagccatcacatatttcttatttttacttaaaatctgtaacacaggccgggcgcggtggctcatgcctgtaatcccagcactttgggaggcagaggcaggaggatcatgaggtcaggagtttgagacgagcctggccaacttgttgaaaccctgtctctactaaaaatacaaaaaaattagccgggcgtagtggtggtgcatgcctgtaatcccagctactcgggaggctgaggcaggagaatcgcttgaacccgggaggtcgaggttgcagtgagctaagactgtgccactgcactccagcctaggaggaaaaaaaaaaaaagctgtaacacttcctcacttcgaccatattggtggagaaggcagtattccacatacatcattccatagacaatggccatttgtctattttttcacggttcatatttttgaatgcaacattgtacatttcagcgtggcagtaaaagggcttcctgaaccttatttcatcatggcctaaggcttggaggttattaggtggtatagaggatttctaaaacacaggtagagccacacggcctgggtttgtattccagtcatataattttccaatcgtgtgaccttgggcaagttaattaacctttctaagctggcgttttcaccttgtaatatagagataattgcagtaccattctcattgaagtgctgtgagaattaagtcaatgcaagtaaaatgattaatatagcaccagaacaaaaaaaaaagccctttagttgctgttgttgttaataataataatattgttaatgttgttatttcaacatcaccaattatgatttttttgtgacacagtgatgtctttaggatctaaagaggtatacaggtggatttaccttatcccaaaatagccccggtctttttaaaaaatgcattctgtagttcttctgactctgtaagattttaggttgtcagctgttactgctgtcaggatggatgttacttacattcagcttccaatatataatacagtgcagccaagctcgtgaaagttatgcattaaacaagattcataccattaagggttgcagtaactctctcagccactagaggtctactccacattcatgggttcgctcttcccagaggtctgcaggtctagccagagctccatgcttcaacaaaccaaaccacactagatacggcaaggatttccttaacctggcattcacagttctccacagaggggttccgatctacagttctaatcaatcccactatgtattacacacaaaccatgactcccagaacaaatgcatattctcattgttttccacatggacctcagcctcttcatctctgtgctttgaccctactattgaccccattgataagcagttgccggccttctccacacacaacccccagcagtctttccacctgtccaaattttcatccttccaaaactggtcagatccacatttataagaagcttacctagtgatctatcttctcctttgaactcactgaattttaggtctataccactcactagtcaatgagtcacagcctatttgtgacatttctcgtattactctgtgcctttatttaactcagggcctactgacactttgcctcttcatctagatggtaagctcctgaggccacatcccacgagtgtcaaaagggacgaaatgtctgaccacttactgagcacctaatatgtacgtgaaaagcacaatgttggtcattttataatcttgatcaataagcctacttgacagatatgtctattccttttgcagaaattgagccttaaagagacaaaatgacttggcccctaaggcctcactgctattttagtagcaaaacccacaattgcttttgcaccaacctaatagtaaaccaagggtcacaattcaaatccagatctgaccccaaaagttacgtaattttgccccattatatcacatctatccaatattgcaggcagtaactactcaataaatatttaggggtaacttgaagagctgggtagcagcttatgctgaatagctgcaatatcagactatcatcaaccagtagcttgcatcaccaatcctcagaccccctgagtccgtgtgacaacttagcagctcagcagtttacctgataagccaggactatttagggatggaaaagcctccttctccagcattccagcagttctgaaggtcctgtgcctggcctcacaagcccattacaggttgcaaagatctaatgatcttctcagaaggaaactgaggagacaggaggcactgagaagctgcacaagcagcacttgcgtgattctcagagagtacatgaggctaacgcacacgctttccctgctagcagctttgtaattccagtagcactacgactcagttagccataatattatgaaatatgtctcaaacaactggatttcatttcaaacagcataaattaacaaattgcacatgtgcacagagcatctgcttacctaataattaagatatttaaaaagtcacctaatggcaccaaagtcagaataatggaataattgttacagtgttttaaaaaaattttaagacacataatccagtcacccgtgcagcgcatcaaacggagggctgctttttcctgatctctttgagcaccgtgtttggattagcatgatgtgaaaagcagcaactgctgttatgtaactaaaccctgcatatacagttgtcagtctgggtaaatttaactctgcaggtttaaggcagagcttgcttgccagagcagaacttaggaaacaacaaaaatttaaagacatattgccccagggaccacaggggaaagccgatgagggagctgttcaggcagcaaggtgcagaaggccagcgttacttcccggtgccacacccgggccttagccccctgtaatagctggtttgaaaacaatgactactgacaagagcatggttgttcaattacaaagctgtctgcattttccctctccctacatggcaataaaggcacttagggggcctaatgtagtttggaaagaaaggcactgaaacccagaatcagggggagactttaataacaggttgccttacagggagaacaaagtggatcccgtctccaggcaagggctcccccgttcccatggtgtggagaagcctgccaagagccgaaccgcggcctgagttctaagcaccgccggtcatgtggctcacgaggagcccatccatcttcctgcacctcaggtttgccagatggaaaataagggatgagggttaactctctggtggtcccttccaaatctctcatttctccctctggtttcattggcagatctatattcactacagacaaggaataactctgtaggtaacctctcattctaaaccgggctccgtcaggtgaggctgagagaaggacattcactgggaaccgtcaagatgtcaaaaaatatcaatcccatgggccatgtttccaatcctcctacctcctacccagacgaactcattacgaaacaggtttgtcctggatcccatccaaaaagacctggtgaagtcaagcacaacgaggaggttcccacttctcaggtgtctctccatgcacatctcaatgccttagggagagggtataaccagggaagagcccaccaccacacgctgaagggaagatccctcccagggggttcaagggaggctggagagtggtactgctttggctgctgcttgttttgtgtggtatcagggacatattccacaaggatgtgagtagactcgaagagatgctcaaatgactcagagcatttgaaagattttccactctgttttataaacgcaacagggccagactagaggaagcaagtgagacgctcatctcaggcgcaggatttaaggggatcccaaacaactcagccatctagataaataacattttagtgcaaatttaaaaaaattgatatggatgcaaacaatccatgatgagcaaaataccaaaatgttaaataaagagagcagcagtctaggtataagcagacagccaggttcttttaaaagagtgggtctggctcgtgtaaaataaaccattgtaacatcttccaatcccactttaaatttagatctaggaagataacctagatctaggagacttgagtgctgatgatttacccacattctcatctttgtcatatccacatctgcatttgctaaacattctcatcatggatgttcgggaatgagcaataccagccgcagaattgtactaggaggatatgccaacaaaaggtacgcagcttccatcctttgaaactagactgaacagaaattttcaaggacgactgtaggaaaattcatgtcctggaaagaagtattacccaaaaatgttcaattctaaaacgatatttctttgaaataattatttatttgagtagagataaagctttggcctgcattatattctctcaaaaaaaaaaaaaaagacaactactatatatactgatacctatttattttctggaagtgtagttcagctgatgccacccccaactcaaaaacctcagagggctcccgactgcctgtaaacttaaattcaaattccagagcccagtaatcaagaggcttactctccatactaattcctatgatttcccttaactcctccttctttcactcacccgccagcagccctgtccattctccttacccaggctttccagccttcctgcctttgctgaggctcttccctcctaggagcaggaaggcccttctctcaccacctgctagcccatctctccttttctaaatcttattcattcttcccatctcaattctaaaactgccttctctgcgaagccttagaactctgttaggtgctgaattatcagacaaagaaaagttagcaagtgatggccccaagtagcttttgcattttaatttaaccctaaattaacccaaatgcttaatttaccaaaaatgcctcattttcaaagcatactgattattccttctctgctctcgggagcagtgccaataggggcaggaaagaaagggaaaaaaaaatgagaaaaaaataaagcttcttttcctcatggactcctggaacaaagcagatattcaataaatgaatacacgaacgaatccaattttttatggacaagaagttagtccaatggccccaggaatcagatacagatgtacaagataaatattctctgtatcccaaaaaacccacacaaagaaacacacactactctcggcccaagcagggaaagaaagaaaaatcccgttttgactcctgaggcttaactgggattcccagctctcccagacctgtgctgcctgccctgggtgatttgtttccgaaactaaggacctggtgctcaaagcctgattttctccatgcaaagccattcaaaaccatcttagtcacacagatagaaggtgaaaatatattgcaagcaaactactggactgaggtctagtttatcaaaccaattacactgagatgttatgggaagggggggaaatgtaatcacatatgacaaggattatcaaaactgcttacacagtaaatcaggaaactgataacaggctgacaatggcatatacctgactgaggaatttcaggattccccaggcttgtaaaacagaaataacaacacagaacgagctgtgccgtgctgtcggggactgggatacacctgggtgaagggtggagggtgagaaaggcctgggacaggtgaagcaagagtctgtctcaaggacccttctccaagaccttgttttgcagggtgccctttcttgttacactcttcagaaacatcttaatgggtcctgaccttggtcaacacagaattagagcagtaagtcaggggtgacatgaggaaactccttggggaacagaaagagacacagagaaatcaaagttgtggtaaggactggggtctatcagagctccaccttgacaggagagtcgggaaaagagtcattctgcttcgtttctggcatcaactgactttctgaggaatggcctagaaagctatatggggcttcacgagtagggacgtgcaggcacactgagaagctctcgctcctttttggaccctgcctttcagggtgttgagaggccatccagggcaggcaaaggcatgcagagtggtgtcatgttgtaccccaaataaaagggcaataaattaactttctggaacatagagtcaccgcaggatccatcggggcccagagcaaaagcaaactgcaggagataccaaatgaatcactgacagacaagacaccaaaatagaggccctaaataaagcaactgacctggaaaaggaaataaatacctacattttaaaggagggctctcctagtcttccctgtgcctcactaggtttggggttttgttcacaattgtggcaccttgaaacactctaagaagtttggctgactcaggagggcacaggcttaaactttatcaacatcggagacggccgtgatttgcatcaagttcaatgctgtccttttggcagttgttgcacttaattgagtgaaaaaagctgtcagtctaatgccccaatcccaaggtagattcactctgaactaaccatctgccagggcttctcccagggtagtcaacacttatcatccagaggactggattcactttctcataattagatcattcctgaattaaattgacggtcccagggaaaaaaaaatgcaaagtgtgttttgagaccagaaagcggaagccgacttgttttaacaaatgcagaagactacatatttttccacagcaacagagtggcaaataaatgacttttcctaaattaggctgcacaacaattattatctttcatgccatcctttgaattatattcaggtttttatttggaaagttaaggcatttcttggaagctccacacacaaacccaaagaatgggtagctagctgttcacagtcccaggtacccaagcaaagtcaggccaggctgaccaatcttatcaaatgctgtgaatgtcaaagtctctgtgcatttgctggcacacccatgaacctgctcctcactcaaaataaagggaaagaattacacgcagtttcttgtatcccaaggtagccatttgttggagaggcctgggttaggggagtcaggtcaaacaaaccactaagacataaacctggaaccaggtcccaaaagcaacacaatcatgctctaagcaaaaacaggtgaagatatgaaacaggaggagagtctgaaggtttctctgtaaacatgatttcattccctgacagtaattgggtgatttgcctcgagtcagattcagtctcgtgggcacttaactgcacaaggtttttcaaacattgcacattaactcaaatttttccaggaaatatttctgaattaactaaagtgcttagtaattttttttctattgttcttcagaagttttcacaccacttggttatcactatttttctgatgaaacacagagacagaaaccagtgaaacactgtctcatagggccttctccaaccataggttaggaaagattaatttaactcaaaatagaatgagaccaatacattttttcctgaatatccagattagacatttccatgcttacttttgcaagggtatgatattagaggtaagataatggaaaacacaaagaacaaattagttcctcataacattacaagcgaaatcgaactgactattagattcgatgtaatatctatatatgtaatatgatatttctatttctcaaacttttaatatttatcaaccctgcttgatcttttttttttttttttgagacggagtctcactctgttgccgaggctggagtgcagtggtgcgatctcagcttattgcaacctccgcctcccaggttcaagcgattctcctgccttagcctcccaagttgctgggattacaggtgcgcaccaccatgcccagctaatttttttttgtatttttagtagagatggggtttcaccatgttcatcaggctggtctcaaactcctggcctcgtgatccgcctgcctcagcctcccacagtgctgggattacaggcatgagacactgctcccggcccaaccctacttgatcttaatagttacctgcagcatttcttaaaaacataaggtttttgggtccttcttctagaggtttaaattcagtaggtctgggcctcaataaccttttacacaaacttaccagatgcaaaaacttagagtggaacacagaggctagaatcaaagcaaaaagaataagaagaaacgtacagatgatgcaatgctggcctgggtcaggggcactcaccttcatctacacataccctaggagggtagggcctgtggtgctaacaacctcataggagcaggagatgagatcttgcagcctcgcttggccagaagctagaattcagatgcctattttaagagtacccttgaaaaacaaaccccttcatgtaagaaagactagaaaaactctaccccttgcccaaggaagtaaaaaaggaacttgccatctacctggaattccaggtagaaaaaacaaaaacaaacaaacaaacaaaaaaaagtaggcccatatgagaagctgaaatcctaaacctatggaatatgcaaacgtatttaggctctgaatttccactaccctgtgttgcaggatagagacacttgtacaacccaagaaacacagtactcagtgagaaaaataatttctgctgaagatgattttacagtcaaaaattacaatcatataaggaacaagttcactatacgtaagatacaaataacagaaattagtataccttaagtacttgacataattgactagtattaatataaaacaagcaagtctgaatatttttaagaagttttaaagaagaagatatagaaaacataatgaaggaacagaatactatgaccaaaaaataggcaagttttaaaaaattctagaaaggacagacaaacatagtcacttaaaattacacaaaggacatgacacaaaagaacacatttggcatgtttccatttatgtgaaattcaataagaggcaaaactaatctatgatgatggaagacagaaaagcatctagctttgggaggatattgcctcagaggggctttcaggggagctagaaatgttctctgtcttgatctgagtgatggtttcatgagtgttttcccatgtaaaaccatcatcacttcatgtatattaaactaccatttaggaatttcaataggcagtttaaacagcagagtagatagaatgagtgaaccattctgaaagaaccaaggaaactgcctgaaacatgagacagacagaaaaggagataaaagatataaaagaagtgaaacgggataaaatgagtagatcactcatatatccaacagaagcttcagaaaaaaagattaagaaaagacaaaagtgtccacgaacattctagaattaaaggaaaacatgagtcttcacaatgaacaagcacaagtcttgagcagaataaataaatagatccatgcttaaacatatcatagtgaccctgcagaacaccaaagaaagagaaaatcttaaaagcaaccaggaagacaaattacctgcaaaggaacaacaatatgactgacagcaaacttatcatccgcaacattagatgcctcctactggtcaaaggccactgccaagccgttgacaatgtggagaatgagttttgttcaaaatgtttgcagagagtacctattttttcactgaggctgcttagtgtcaaatgcatccttccttcattccttcaacagactgagtacccactatgtgccagcctgggcaaggaacgtttctgctttcaaggagctcaacactgtgaattcaggtgagttgtgagcgctgtaatgcagaaaatacaggtgctctagagggcaaaggaatgatgtcaaatccagaggagagaagtcaaggatagcttcttggaagagggagatccaagctgagactcaccagatgggtgggaattagcaagtgaggactgtgaactccatgacagcaggaccctcgtctgtcttcacacgaatgtatccccaggattcagaacagtaactggcacttaggaggtgctgcataaatgcttattaaatgaatgagtggataaatcgattgtaatggcaatcaatgagtggataaatcagagcagataaatcaacacaggtataagggaaagcacatggaggtgagaatgcagagcatgttggaggaccaaagttcagtatggctacaaaggcgagcacgtatgtgagtaggggaaggacagatgaaagatgagtctggaaggctggacaggggacacctgaggccaggttagagggtttgaattatattctatgagcaaccggaatccaatgtagggttttaagcaagaacatgagatatgagatttgcatttccaaaaatccactttggtcccagtgtccatgtcagaaaagtgagcactgttccataagggaaaagagcacttcctcactggtattatgacatgcagctttcagacttccacccaaaaagtatgcgcaagagagagcgagcaagagaaattgagactgtgcgtgaacaggtctaagaaataaacataaaatcctggctatccaaatcctgcagtgggtgtattttccaatcagccctgaggcttatggaagagataaaataggaaaggaatatgtccccagctccagccgaacattctgttcaggcttttcaatctaaaaacttcaatgtgctggtcggcaccattgctgttctcgtgtttggcctacgctgggccaaatcctgccccaaaatatcaacgtgtcatatgtgggcccagacaaggctttctaactcttctgaagtttgagttttttccccttcttataaaagcagtgagccagagaagagtccatggtaataattatggcttttcttgtgtggacagcatccagaaaggggcagcaagcccacagagcctggctgaataaagccattcctcagccaatgccaacttcagcaacttctctgttagcagctcttgttagagctgcaaagcaccggtagagctggcgagggtggggggcaattctgaggatatgtccaccttgcgttcaagggtcctgccgtgtcataaactctgcatctttcgtattcacagtacacagcacacgcctctgccaagccacagtcgcaggttgttctcaacaattggttaaagttacttgtcaggattgcacgcaggaattcctccagcaagatcagagtttcgctttgtctagtcagccggaagtcagctaagacagtgaggaagagagtaaaatctcacggagttctctagcacatccgtctcaggcctaggaagggcaacaggatacctaaggaatgaaaggaaaacctgcaaccagaagagtgaaggagctggcacaggaacagccagagggcaagagaaagtagaaaaacaatctctaggggcagctgtggtcagctgacttggctgaacactgcacaactccaaggagctccatttgcttaggctgcttgctacctcccacctccacacatggagaagggcacacacacagatgaaaagggaagccagggtgctggggctgttacggagacacatttaatgcagtcaggggaaggggatggggacctggggttggtggtatggtaggaggcacgagccatggtcgagagcaaccttctggactcagactcagcaactcttctaggcctcggtcctctaatctgcaacatggggttcataattcttgcttcctaaagacgcagtgagaattttaaggactgagcccagtgtgttcagaacctagagcagattaagctatcaataagagctcctaactattgtgaaccactatcacatcacataccgaactctaggataacattcttattaactcattgaggatgcagataatactttatttaatctttgtaacctcagcccctagtgcagtgcctggtgaatataagaactgattattgcagaaggaagggagggagagaggaaggaagaaattcttatttctatatcatggccacccagcaagcgtcaggcattattgtgaacactagcatattcacaaatactgtttgttgaatggaaagtatttattcatcagctacttataaaacaatagctgaggacttgctgtatgcaaagcactgtgttaaaaaccctgggaaacacgtggacaaccccacgacatccctgttctcaaggatctcataacttagccagagactcctacataaatcatcctagcaataatcaactatgataataccataatataggcccaaataaaagaggatgctgaccatcccgcccttcaccccgaccaccaaacaagatatggcatttttttcctatttccttcccgatggagagaagaaaaatttcaccactttaaagctgtgggagaaaaggataaggatgtgatcacacctggatgcagtttgctcatcctccagcccggcagcacacagccctcagcagccctctctgcccagttgccagatctcaggctcagcacacgggagggtctgatgtttactaaacaatggcctggcttatctttctccacaagaatcctaccatatggattcaacaaaggcaaagctttcgcaggacccaagaggcagggtgtgatgctctaaaggatcacttccaccagtgggaacagtctaacgcctaaattccaaaagatattactgatactgtttataattagcatgctaaataaaactgaggcaagctgctggctttcgtaggcctcatcccactatgcagttagaagaatatgtgtctgtgtatacgtgtgtgtatatatatatatgtatgcatatagacacatatgtatacatatatacacacacacacatgcatatatacacacatgcacacacacacatactacttgttgggcccaacctttctgaaatttataatagagaaagcctacaaaacatatttaccacacatgtgaagatgagaaaggcaaatggaatagactttctccttcatcctacaggacgtgctagccaaggatggattccaggaagttaaatggacctaagaacagctgaggctcaaaacatactacagattaaccacatttccagagctaggttttaaatgagagaatcatttgaggagcatccagaatactgacttgctaccctccattagctagaagctcagcaaatggaagtgcacatcgtggtttcactcacaacatgaaaagaacaacacacattaatacattagagttgtcttctctatggtttctctttaaagaaatcaacagccccaagacttagctcagtcctcttctcatcacatctaccttttcatcacaattacatttggcagtcttcgtgattccgagctgaaaagcaaagtatgaggctgtttccctctgtgggtttgttattgttcatgataattctgatgacttccagagaaaaatcctgaaagtgacattactaagttaggttaacagccagtgtccttaactcttgcttccaaatacttcatccaatgtgtaaaataaatgcaaaacaacaaacaggctgtcattgggaaagcttgagtcaagttccctaacgcagaaaccttacattcatattaatcacatagcaaggaaaagtacctacagctagtgctttcacattactgatagttactacatagctgcttaatcacattttcaatgacccagccagctcaatctactgacttggaagggtttaaaacacaaagctccggcctcttctgcaagggaaggcctgaaataaagacctcgcatttctctaagagagacctgttttttcccagtatgggggtaggcaagaggaggggaagcgctccaagggtaggaaaggaagagaaaggagtctatcagttgatgaatgaataaacaaaatgtgatacatccacataatggaagattattcagcaacataaaggaccaaggtactgatccattttatgacatagacaaacccccaaaacacaatgctaagtgaaaggaggcagacacagaagaacacatagtatatgattccacttaaatgaaatgtccagaaaaggaaaatctatatatagagaaaacagattaatggctgtcttagactagggctaggaaggaggagtaacagcaaacgggcatgtggatcttctggggctgatggaaatgttgaactagactgtggtggtggttgtacaactctataaatttactaaaaattattgaattgtatacttaagatgggtgaatgtaatggtaagtaaattatgcttcaataataatttttttaaagttggaatgaataaagaagtatattctttggtggttcctttaaaaatcacaggattatagaatatcagagctggcaggaagctgtagttcagtgcctctctgtactaaggagaaggtgaggtctcagggtgaaagccatttgcccagagccacttacataattaatggtgggctgggatcagaaccgaggcctcctggttacttgtccagtgtattcttcacaatttgtcttcattattttgcttcacataaacactcagggcattaaccataaagataataaaatatcctcacaaacagatgtgcctgattcaatgaccagaatgtttttgtggtatatatcatactggataacccatgatttggttattctctgcttgcgttagtacttatatttttcgttttcttgtcttctcagtatttgtttttaggtaaaatccatggctgtttataagctttaaattgaaggttctttccttaccctaaagattcacagatgagtttttcagaagctgaatcagctctaaaagcctcactgcttcagtacttctaatggccaacatcctaattcagagctcgccacaggggcttgtctttctaatagaaatgtaaaatagatctttatttgccacaaaattaaaatgtgatccaattatgcacaatatgaaggaacttgttgttgaattacaaaaaaaaaaaaaaattcacacactctaatttaaaacaatgataccccagccttaattaccttgggtttcactactgtgatttcaaacagtacaggaataggaagagaggtgaccatgcctaagataaaatacacataggaaaatacaactctgttgaaacaaacaaatgacaaagctaaaaaattttaactttttagagacaaaccaaccaccctgtaaattattagtatgctttaggcatcaacctatgttatgaaatgaatgtttgtgtccccataaaatttacatgttaaagcgctaatcctcagtgtgatggtattagaaggtggggcctctagaaatgtgagaaaataaatgtctgttgtttaagccacccagttgatggtgttttgttatagcagcctgagctaactaagacagccaaatactttacttttgtacagttgtgcagacctctgtataactcattacagtgatcaaggtcaaatggttacacaacatccctttctcaggaactcgatcaggggttattcatgtgcattaaagtatgtgagaaaatatttagcctccctaaatctgcattttgcaaggggctattcttgcactgacttacttatacatttatagtctatctcccaatgcttttgccttggcataaagtgaaaattaaaatagaactgcatatttagctcaacttccccgccacagaaccagtccctaactttctaaaatgtacttcagccttaaagtgatgcctgtctcgaaactgcttcacttttcaggtctctgtgtgtacaggggccagttggacagatgctcccgggatgctgagggttccctcaagaggcaggtgtctcctctagaaacatagatgttaaaatgtgcagttaacaaggaagggcagagcttcactaaccagcatgtgcagaagctcagaattgaagtatactgatgatcttacacttaagaagactccaaactgcccacagggatcagaacttttatagccagtctttctctgacaatgcccagtactgtttcctattccatctaaatgacccagctgatacctaaaatggaaagaaaaattccaaaactgaaggctgtacttataggcaataaggcgagtctaagacctaaactagataatttgagaacagggaaaaaagattccatttcgattcctgaaggttacccccatacctattataacagaataaaataaaataattcgaaactgcacaacctctaacttatcaaatcctatatatgcctcattttctcaaatgactcctaatttgtgtaaagaaaaaggcaaaaagagaaaggacagaagtatgtcaaggtgggctaaagctatgaatacccttttatgtaaactaagaaaaaaatagatacacacgcattttttaaaagggaactttttgaaaccttgagccgcaaagaggaaaaattcctggctaaattgcaccactcaaagacaactagacttacggtcataaatttcttctccaacccatttctttcaggattcttacagatccatagcattttgcaagctgacataggaccctttcaaacaatgcaacctaaccttcaccaacagctatgattctcttcctactcttctgcacagagaggccctgaccctcagctgtcgctggagctcgagatggtggccaaggcgaaagcagtcaagccggagaactcccgaaggtggttctcaggtaaccagctggttagatttcatcttgtgtgagtttagctttgcctagctaggccaaggaggcacttggcctgggtttagaatgatttctgtttttcttcagggctcaattataaacagcccaaagaaaggctctgctgtcctggagggcacctttcaagagaaacaaaaatgggacgctcgcttaacaaaaggggactgtttggccaccaacgtcctgaacagggtctgagtgtataactggaagggctttctgcaaagttaaaaagacagagaagaaaacaacagcaaaaaaaaaaaaaaaaaaaggatcatcacagaatctcccattccaaaccttccttccgctcagaagtgccaacagataaaatataaacccctttgaagaaaactccagccggagctcagctttcaggttttagaagacactggcatcccaaggccttcccactgtcagatcaaacacacacaaaatatttccctgatattttcccagtttcgcccacaccataaaaaacaggctttccttttaatctacttaccacactgtgggtgaaggcctctaatttcacagcacagagataacacaaataattcatatgacacattagtgaaatattgacagggaaaacatctagtcagagctcaccgaaaacaacagggagctcagtgatggccacagagggcagagggatgcctttccaacagggcagagccccctcccgccacactacttgagttgaagataaagtcagcctatttggatccgaattgttttaaggcaacaggtcttcataattacacaacatttttctggtccctcgatgggctgcaacatcatcaacctccttccaggacttccaggggctgctgcgtatgtgaaagtccctagaaaactgttaagtgccatcaacttgcagcaatggcaatcccacccagtcataaccaaggtcagcatccgcctggccaaacacttggtgcatttctttttctcttcctgatcaacttaaaaaaaaattctttcacttagtttcccatggctagacccagcctttgaagatctcaccccctttctcaagaccctctttcaacttcctctcctacgaagtcttcctcccagggcaataaggagacctatccacagctactattcattccatttctcccacccttaaggttctgccaagtgtggggcagattgcctttagagacaggacaactcaatgctgtctgtgtagaaagggttgtttgtttgtttgttttaaaaaaaaaaggctgcaacacttcaatcatcagttaggcatgttgggagagcaccatcaaagcagagaaaagtgaaatgcaacccgaaacagcaaagggtctaaaacctgactctgggcttacaaacgttctgactttatttttacttatttattttttgggacggagtctcactctgtcgcccaggctggagtgcaatggcgcaatctcagctccctgcaacctctgcctcccaggttcgggtgattctcctgcctcagcctcccaagtagctgggattacaagtgcacacctggctaatttttgtatttttagtagagaaagggtttcaccatattggccagggtggtcttgaactcctgacctcaggtgatccacccacctcagcctcccaaagtgctgggattacaggcgtgagccaccatgccaggcccattcttacttttttacaccttatgtagatgtagggtctccaagtcccaatccacttttgtgagagacttttctttgtcatcgtaccaatccaagcccttcaatttcccaaccacacccacttagaccttagatttattttctgctgatatcatttcaaaatccatgaacatcacctcatagatgtaaaaattcaccttctaatcctctatcaagagtgctgctcagagttaggactccagctctctagcctggccctcctaagtgccagatacttgctattgctatttttttgttttcttgcctaatgccacatgtaacatattgtcacctgctccctgctagacccccattccccgctgcccatcagatatgtccctggaacttccaactcagcccatcccaaattgaacccatgccttctctcctcttcacactctactccactacactgtcccagccaataatcccggcccacactctgcacttgactcctgccattccctccatcatgttcttccaactccacttcctggggaatcctaccgcagagtcaactcttcttcgccttccactcccaaccctcaccccagtcttggccttcaatatcagtcaccagaattattacagaatctcctaacttggttccttgtctccctccctaactccacataagtatatttaagtaccttaccaaaaagaaatcaggtatttttcatttgttcaaaattttgctataagacaaggtccgaaatgcttaggctcgcccctgcctactttctccaaccttatctcctactcctcaccagcatactctcaggccaagctacatctcacttatgttacctgaatgtgccatgaactctccccttgggtgcctcagcctggaatgccctgtcactttttgccaaaagaatctcctcatttttctaaaacccgggcaggcataaccacctcagtgagctttccctaactcctctcggggcattttctccttcttctctatgttataggtttcctaagtatctctactatagcatgctacatctttttaaagtaatgtctttcttgcccatcaattcacttaattcagctttgtcgttccattgactaacatgggacctgacacatagtaagtgcacaagaatatttgatggatcaatgcaaggaggcgatatattctattatactgcccttaaacatttgaaactttcgaggaatagattttcttgcttcatcccagtcctccctcagctggctcatctttcacatattgattctaaactgcacgtcactagcatcctgagggcattcaccgaatgctcatgtaaaaggcagagagatatgggacagaacactgaagacaatctataacctggctcccaaggaactgagaccaatgagaagataaacacagctgaagtcgcaaaatgtgaatccaatgaggactataactaatgagagctaaaaccagagtgtgtttgctactaagaaaataataatggaaaagaccaattaataaagagatgttgtcaaacgccatgacaattttcattaaaacattttattaggctgaatatgatattgatgctttttcattgaggtttgtattaaaacttctccactaaatatattcttaattcagatgccaggcattgatactgtctactatctccttaaatccttgcggggtttaaaacttacgttgttgatttcaaagacagggagtgaacagtggcttatgaagcaaattcgctttcaatatattgatcatcagagcaagcattatatatacgaaagttaaaggtattctaaactacatacaatctcatctctatggacaagtctttctgaggttctagattaccagatggtggtgttggcaatgccacagaagcaaaatccaaaagcgggggcaggtgagagatgggaggccatcagtataaccccttctagatgctgtggtggcagaatgcagagagggggccttggaggcagcaatccagactggagatggaccaggtaaaagttttcaggacctccctgcccataccaccctaacggttgaaaactcctggacaattactgccaaactatcccctgaagccagtcctcttgtgggcgaagggataatgtcactggaatgtcatcaaagtttaacaccttcttggacttttttttttttttttttttgagacggagtcttgctgtgtccccaggctggagtgcagtggcacgatctcggctcactgtaagctccgcctcctgggttcatgccattctcctgcctcagcctcccgagtagctgggactacaggcgcccgccaccacgcccagctaatttttttttttttttttttttttttgtattttaggtagatatggggtttcaccgtgttagccaggatggtctcgaactcatgacctcgtgatccgcccgcctcagcctcccaaagtgctgggattacaggtgtgagccaccgcgcctggcccttcttgtacttttaaatctacctgtcccactgggagcagccatgttggacactgccttctcaggtcctatttctgctcttagggttcatgtgtgacttaaggcatagaaatgtgcctctatctttctgctgtggaaagaaaattgtttgacaaatgtccttccttaggagataaatgacaaaataaaatgatcattcctgggcccttaatacttctttccaaaacttgagaaataccagttaataggggttctcagacatggtaataaggatgaagaggttgaaacaaacgtagaaagccttgttttcaaagcctggcattgatgccatcattgacttgacttgtcataattaatatgtgtccccattcataatcaacttgttaaaaggcaacataagccaagcatttttttatgccaaagtcatatatcttcttgatctgcctgacacaatatgtatgtgtgcatgtgtgtgtatatttatatatgtggctgtgtatatatatgtatatgtataaataaattcactttgcacagaaccaattatttttgttcactgactgttcaatattataggactggggtttctcttctcagctagagtctatttcttaaagaccagctcctctacgtctgcatgtgtgtgtatcactcacactaccacaatacaaattagacaaaatagatgcttaatggtgtaattcactttacaatggcactattattacagcattactctattttcattactaccgcatattagaatcggcttccaacatgtttgagtgaagaaataaaacaacctaatcacaatgccaattaattctgtaaaagtcatgcagtatatcaaaactaaaacatttcacagccatctcagaaagacaggattccatacttgcttcactatttttagccagctatgcctctactccttgaatactttgacctatcctagtccagttataagccaaaatcgataaaagaccctaagcaagtttaattgattctctaagaaaggatattataatccatcagcacaccctcaccttgtgctgacattattttcctgggtttacctaataccactgtggtaccaaaaactactctttctcacgctgttctctcatcagctcaaatactgtaacagcagagcaatttcaaacaggttgcgagtcttttagagtattgcttgcaaagtgcatgtaaattattagattacattacaagtgaaagactcagcagtgggtcaccatagtggagcattaatgtacagcaagttgaatggaacccttgcagacaagcttctccgatgtgatttttttttttggcagaaaggagaaagtgagtaaagggaagggagggcaaggaatgatgggttggtgaaaagtgaagtctctgagagcaccagggcaaggtgggaataaggtagcaaccccagcctcagtgcctggatggggcagccagagggcagtacaagaatagtgggagcagggagacagggaaaagggaaggaagaagccagacaggtatgggaggtaacgtcaggaaagctcaacaagtggctgatggggctgaatttcagtgatttgtcctcttttaattggatccagcccatggtagctgaactgagggattaatgaatttacctaaggtcacacggctagcacagcacacacctgggtcttggcccaggtctgtctcactcctcccagcaggcttgtaaaaaccacatacacatattgtctcccaacacgtccagctttggtctgagttgctcaagactagagtaggcctgatcgtgcaattgaggggatcagtggattcaagagaggcagaagtcacacaaacaagtgcagctgagtccaaaccgaaggccccattggaaatataagacagcaggagatgtgcctgcagagttgggaagtgcctagctggtgtactgagaaggcaaacacctctgcaggacaatgtggaagagagtatctgcatgcttaatgggcacctattttatgcaaggtatcgtgcatggagtaaaaacataaactgtggtcttgatctccttaagactaggctcatacctggaaaataactatcagacagcgtaaaagaggcctggcagaggaagaggttacatgttcactaaatgagcaaggcccatatgactgactgctgtaacaaacaggagtctgggagcttcaagagggagaaggtggatcttatctggagtgaaaatgatggtaggatttcaatgagcagagagagagatggggactaggtgaggcagaggaggaggggaaaggtgaaggcacatacaaggtagagagatgaaaaggccaagttcaaaacacatttagaagagaaccaccataaatgcctggtctgaggtgacccaggtatttcagtgagcttcttaagagaaatgccaccactcaaatataagatccagaaaggcagggagctcgcctctcttgtttgctgctttatccccaggccctagcacatagaaagtactcagtaaatatatgttgaatgaaagaatgccacccttgggctcttacacactgatgtcagctccaagcaaaagagggatcccagaatttatattctaagccagtctaggcagatgtgcctctaaatgtactagcatattaatgagcatgtgctaaaagtggcataaagatactgtatgattataaataataagtatttacattattttccctccccctcctcctccctgaagtcataatgagtaacacctggagcttaacatcagttactgtggaaacacttccttcctcccccactgctgggccatggtcccccagaaaggctgcttctacttcatgcccaggacaaggttttcaaatagtgaggagtggctcataaatagatcatgaaaccaatgtggtggctcgtaatctgtattttaaataatagagcaaacacaatcacgcatcacaagtgaagggtaaatattttacatgaaatgtttgtgtgtgtgtgtgtgtgtgtgtgtgtgtgtgtactagttcacaatgtaattaatatgtttttctcattgtggatcacggtattaatgtctcaaagatatcgccctgagaggcaagcggttccagtgttaggacctgtaatattcaagctgaatgacccttgttttaccggctaaatgtgcctgtcaagtggtatttctctttggcccggtaaacttgacccatcctgaaacactgagatgttctgtgtaacatactaagttcagaatcagttccttcaaaggatcccaagtttcacaacacacagtcttttgtggaagaaaaaatgatttattttttctaattacaaaagtaacatatacataatgtaagaacttcaaaaaatacagaaaagcacaaagaaaaagaaactcacaggtaatcccagcatccacagatgaccactttatcatttcatcattttggtattcgtgggtccaagttaatttactaatataactcacacacacacacacacacacacacacacacacacaatttccttctacaaaaaagatggcattccatgcacactgctatgaaagctgttacttttcacttagcaatggctgatagacactttttcttgataagaaatacttttctagtgcaacatgatttttaatggctacataatattccattcacagacttgatcctgagcatctctagacaaggtacagccttaaatcctctactttgagaaaacaagcttgctgcggagacacacatctttgctgtgggcctcctggctgtgtctagctctggtgagcactaagcatgagatgctcaactctatacctattaatagaaagtaaaaatagttttactttccactaaatcagagcatgagacttggacactattttcactatgttttagaatggctttactgacatagccacaagctcactggtggatttttaattaataataaaaatgcccagtggggttaaaaaataacaattactgacaatgttccactaataatgcatagccaaaataacccatgcttaattttgtacataatctactgcctaatgctagatcaacttgcacacatcttaatagcctcattaggctgggtgtggtggctcatgcctgtaatcccagcactttgggaggccaaggcgggaggatcacgaggtcaggagatcgagaccaacctggcgaacacggtgaaaccctgtctctactaaaaatacaaaaaaatcatctgggcgcggtggctggcgcctattgttccagctattcgggaggctgaggcaggagaatggcgtgaacccaggaggcggagcttgcagtgagcagacatcacgccactgcactccagcctgggcgacagagcaagactccgtctcaaaatttaaaaaaaaaaaaatcctcattattcgaactttggaggatcctggcacagcacacaagtgacaggaacatgaggtaagaaagtacaagacttgggttctagtcacagtcttgctgcttactaggaatgtgatctcgaacacgttacctttgtcagcatcagttcaaatagggtgggctaggctcgctgattcataaagccctttctggctttaacacactttagtctaataaaatacgaccaagtggtagcatcatgagtgagtatcacatatttaacatacaaccccaagttcaagactaaaaagtcagctttagagggttcaagagccctttcagtgtagcttcagttcttcttctgattccctgtgagtcctcaagaatgctagggaacctcaccaatccttgactgtcatccttcacactgtgaaattttacagcttgcaggttaacagcctggtctatagaaattgcccgggttcccactttctgcacacatgtgctcatccaaagcacgtgatgagtgccagaaatggtaaaatacaactctggcaatttcacacttgtcatcatcagtcaactaataagagcactaaaagaggaatcattttttgatgatcaggttatttcatttgcctttgctttcccaatgcttcattacctggacaattgagagttatgagcagttcaccctcccagttgccctgtcccttcagatataatatccccgtcacacaaacattcctgagagtacatgctgtattgtcacatggccttttcatcatccactggttttataactggaaagtgaaaatgaaaagcaatgcagtttatttaagaggttttagacttgctaaatatacatgtgtgtcctctgtgattggatgttgaaaatccattaatttccacacagccactcctccccatgactggcatcgatcatatgggatgaaataagcctctttgcttctggaagggcggaatcacatctggttgccttttctctgtctttgtccatttcttcaggtttctttaaaattaattggaagagtcaataaacacggctgccaattccctttacaccctaggaaagcagctcaccgtgcccttcagacctattcttgctgtttttccaagtactcccttacctgcctttgtcaattggcattctcgacaagttcgtcataacttctcaaagtgtcaacttttcctcttttcattgcccttgttaaagataatttaaaattagaaagtcacattcccagccatttcagagtcaatgctaatgtcattttcctttgcacagaagtctcttttccctctagaggctccctgccttcatccacagcccccactccccagccccaaacaggcattgttaatctctgcaggcactagtccattcccctatttcatccttcttatctttcccccaaaatacttcacccagtgaaacacactttagcttctggttctccttccttcactccacttcagagagaaatgtctgggtctagagattgtaaagtcaccttcaggaaagaagcatacagttgactgtcaattaatcaggataagacagaaaaaattacaccatgtgcagcttggcttctcagtacatgcatttatgttttgggatcaagaggatttcttccgtacaacctaaaattcatatttatggcttttgtttggctacaactaattcccttcctaactgcacagtagttaatagtctggaattcttaaaacagtgattaccatacttcatagtagattcaaacgatggtccctcatttccccctcattctatttcacctctattcttgcctgtttattcttggtagcattctttgcttatacaaaaaagtcagacgattttatattctataatttttattctcgtggc[450 bp omitted]tcccttgagcccatctctttaagaaaaaaaaaaaaaaactaaaaaaatagttcataatcaaaattaaaacacccaataacattgttaagatgattctaggctaggagattataaatcctctgtaccataatatttcctactcatttccatcctctgacacagagtttcagagaaaacatctatggtatagaagctctacctggggcagcctggagtcctccaccacctacaagggtgtgtgaaacctgtactctcagctgtcagtgggtgctgtacagggctccctagctgaccaccagggccccagttctgcggacaaaaccatcaccaggaaaccacagcgccatgccactgttaatgtgccatactatgtaatgtgataagacagtctgtaataatgacgtgtcagttaaggccatacaaatatgttaggaaaaaaaaattgttcttgcaccaacacaggggaattgttacctataattccttttagcattagcatgtaagagctggcgcaaaaagccggcctgactaaactgtgagctatggtacatttattcctcatcatgccccattcctctcttctaaggatttctttagacaatctccttgatgtctttgctccaaaatcaagagagaaataataataactgggctgtcacaaaagaacatcaggactcccaagctgaatttccaacactacaatatcaaagataatcacaagacaactgcagactatatcattaagtcaagtgggacatccctgagaaagtcagcttctgatggtgtggttccagggatgctttccatattcgtccagtgaaaacaacctgtgcttggaaagagggtttcctttggggcaatcgaaatgttctttgttgacattcttggaattattccttctaaccctagagtttcctaactttcaggatttaagagcctcatgccaaagataccccttcaatatatctatgtaagagttaggactacctggagtttctgtctaccattagatgggagaaaacttatgttatcataatacagtaaataacttacttgaaaatataatatccttcctgaatattcaagaatgactttaccgccaggcatggtgattcacacctgtaatcctagcactttgggaggccgaggcgggtggattgtctaagctcaggagtttgaaaccagcctgggcaacatggtgaaaccccgtctctactaaaacacaaaaaattagctgggcatggtggtgcgcacctgtagtcccagttccctgggaggctgaggcacaagaattgcttgaacccgggaggcagaggttgtactgagctgagatcgtgccactgcactccagcctgggagacacagcgaagactctgtctcaaaaaaaaaaaaaaaaaaaaaatgactttacatcctctttaactccaaagaaagaattaagaagagcctaagctctggatgaaatattcctataaagtaaaaatctcaattaactaaaatcaactaattgaatttctattttgctacttgcaacttagacaacaagggaggaaataacaaaacatactgatattgagcatttaacaaaaaaagaaagaaagaaaacaatttccaagtggggatcaagatagatttagtccaatctctgacactgtgtccatttacagttctataatgtacaattggaattcatactcagaacagtgaccttgtggcaccataagattctcaaacctcaaagaaagattcaattacattctcagtgttctttctagagtaggaaacgggactagtacgtttagaaaacgtattcaacaagtaaaggacaaaaaatactttgggttaatctactgttagtcagaaaaaccaactcatcagtaatgtcctggcacccttagagaaaaatcatggtttactgtgtattaatcaacacttaaacactgattctcaggttttttttaaagcattaattttaaaaatacaattttattttaacatacagcctaaaaagatgggtgaaaaatttaacagctcatttctaaaccaacacttcctgcgtgaattagatatcaaaaaaaaaaaaaccactaaaaaatgatagaagagaaaatgagagacagagagtattattcctaaattttgagtaaggaagataatcttcatattcagaaaagtattccaaattctggatgagtattcactccaacacttgaaggcctttcaaaaatactctccttgtttctgcacactttatcactaatctgggatgaatgggacaggaatctgtgagcgagcagatgaggtctacctcaaagtccctgtatattggctcatgggagacaatgaatgtgaacagccagatatgtcataataggagaggtgcgtttcctataaatttttttattatttgtttttgcacacatggcaatcacattacagctctttccccagatacctgggaaatgtggttatgcatttggcttccacagaagtgtaagctaagaagctcaattcatcaagtagcctgggaagatgaagggggaaaggaagagtaaactcagaacacatggcacatgcttaagataccataccatatgaacctctaataacctccaactccatctctcctgtcaacatggtaccgcaagctcctaaacacaaaaatgggagaaggtggatcttaattcagaagtgacatgtccaaggaaaagaacccatgggcttgtctcactcgaattccaaaggttagctctggacagagggcagtttgcttccaaaagtgattcagctgtcactaaaaatcctcagaacatttttatccggaggcacatctattacaattaacattctcacgcctccctgtgtcccacttcaggagtctagtgtggaaccagaagtgtgtgctacagcccccacctctgctaccttgaaaacaagctgaagggtctcatcgttaggggcttcaatgcaggctccatacttcagtttcagacgtagaggcattttctaaagccaagggctcctcaccatgccagtaggtattggaaaattccagcaggtgactaacattagaagagtctcctatagatgttttgaaccactcaggacttgaattctagattaataattcaattttttttaagaaataagggggaagcaacagaaaaggttatcataactatcatcaaatgccttttctataattattatattacatttttaaagggtattattataaatgtttttatgagcaatttaccggaaaattaaagtcctttagtttaaaaaataattattttatccctctggcaaaggcttttctcccagtcagcagctctttcaaactatggggcatcatttgttcactgtggcgagccgggtccatgtgaggaaagttgatctgagaatcaatctctagaaagggcgctaaattgctaggtaagagcacctactagaaagtgaatcagccaaaactgaagggggcaagagaggccacgcactttcaaagtcaaagacgtatgtggttctagaagtcctcagggctacacataaactacaggccctgttaactgattttaagtcaatctaagctgagcttccagggggttcgatctcaacccaactgagcttttcactgttaatcccatcttttggtttcgatttttcccttaggtctgccggccctaaaagccttcaaccttcagcactggtgttccaaaccaactgtgtggtggtacacagccctgtgtggatgacttcactgaactaaaatatgtaagcttctggcaagcacatataataacgagattctgaaaaagggtttttaacaacagttatgtcacgaggctcatggctccctgaagtccctgaaagccttgttaaattaaagattcgctgtggttttttttccgcttcattcctacttcccttgtcgcttcctgcctttcttttttctctttcattgtgttgttaagatggaactgagtgacaccagctatcattaatatcacctagaaaatggaagagtttcattaaaactgctaacattcccagcagttttatggacaggggaaggtcgtctttcagattataaagtcacacacctgattttgtaagctcaggcaataaaggtacacagtgcatccacacttggattcccaagagggaggaattcaacagtagcctcaagtctacctaggtaatgtctcatgaggtcactgcaatgtcatgagaattcagaccacaatttctgtggacttcaaacactgactgggtagaagctaaacctgctaccctttggaaagtatctcccaaatcagaaagcttcccatttcacccaatgccaagaactccactccaccctcctggaggttgaaaatgctaatcataaggtgatgatgtttgcttttcctttctagttgtgtgcctttatgttttaagtatttaaaaggcataatcacctagtgtgtaggttaatttctttccgatattgtaatttatgcaacattaatactggatgccagctccaattttcttactgcttacactctgggagccggcttgcatattctgccaactccattacatcatctgaaaacccaaacatttcccattttcaaatcactctcaactaccaggcatacttacacattctctctttttctccctagctcacacacataaagattggtacccctgaggagcagatgctacatctgaggttaaagtctgcaaatgcacataatttctggaagctattactactgctgtgttagctaaaggatgcctccatctctgaccttcctttttccattcagactgttatataacctagtgcctgcgtgcaggatgtgagttgagtgtttgggccttaccacccccctcccattaaatcttccaggagggacagacaggggctggttcaaagaatgagttggggtgggggcagagggtggggggaaggggatatgggtcagcaggtcagctgtgcaagatgtatcccactcctactatgcccctctcccctttttgctgagcctaagggggctggtggcactgaatgctccggcgttacataatttgcaagaacagcaagttacggatttgctagtcggctctgcagcctgccaccctgatcgcttgcaagaacaccttctggcaagaatgacacctgaagatgttaataacacagggtgtgggggggtcaagaaggagaaaggtggcagcacaaaccaaaaattagtgcagcttcctaaatactatgtcccccccattccaaaaaaaaaaaaaaagccccagaaacacatgaaggggattttctccagtgtttctgattaaccctgttacataacccgctcgcattccaaatccaccgtctcagggtctaaatatactctttgcagccaaaagctccccgcacacaaactcaccgagctagcggcaggtccaggcccccagccctcatccccttcccttttgtcccagccctcgccgcccccctcccgctgaaaccgcggttcgccgcggtcaccctttggaaatcgcctttaattaaatgtttttcgcgtgtgtcatcctgatggcttttactgtactcgaattccgtgaatgggaaagcgcctggacagggggtgtggctaaggtggggggggggatactgtaaaacagccagcacatgatcagccatattcctacctccaactacaacatcgagaggaagggagcagttcctggggcccccattcgcctctacccagccctccccaaccgccgccagaagccgagtgcaagaggagggggcgcgctgggccggtacccaagccggggctggagaaatcctctccgtccccagctccaggcggctcgcgcgagcacgcttcctccggagtgacaggcgcgatttatacattatttacaacagtaattaaagctgtagcttcctcctgttctttgcaaactccaggcgcattcaaataaataatcccccactctcgagaaaaacacacatcaggttccaataccttcaagaaagagtgagctttcctcaacagctcactttaggaaaggagggagcaactgagtcccccccatcccccccaacacacgcagacacagaccaaacaccaaaatgaagagtaaaaatcgccaggggaggagaaaacattgcttgcactatccaaccagcatacaacttgcactgaccatccccaggttcctgcagaaatgcttggaacctccgagagggaaggattcccagagcagaaataagtttcggtgcttgcttttgtagacgctccctccggatgcgcgtggagcgccccacaggaccgccgccctctgcgcgttggcgcgcacacgccccccgccagcctgggcgccgggctccgaacccccggtctgcaaacttgcgcatctcccctcgccgcgcccgccagacaacttggcgaacagctcgcccgcccgcaccccgcttccttcggcccttccttcaaatcccaaacgcaccgccgtgctccaaagaaggtgtccacgtcgcccccagaccccggagcgccccctctccacccccgggacttcccaggtcgctcactcctcccgccccccgcccagatctgagagggaccgaaaacacacccccgactcgggcagccagggccgaaactgtcaagaggagaaaaggtaaagcggaaggagggtggccataaacagatttttttgccccttcttaaaaggacactgccgctttaaaagtttctttcccgggcccccactccccgcatctccgtattttgggggagcgtatttaattgaggcaacgcagctttcctccagtgtttgcagaaaaatcaaagccaggggggtgagcccgccggctgtcaaccttcccgccgcctcccccgccccactctgctcccgcaagccgagaacgggctgcaaaagtttgcaacatttctggggggcggaggggggaggggaggggggtcctccgggctcggggcgccgccgcaggctcgcgcgcggccgccggaccccgcgccccgggcgcccgctcccggccgccccccgctccgcgcccgggctcccgccgccccctccccagcccctctccagcctcctacctctgctggtgctggaatagctctgtctgcgcaccggggcaggcggctcgctcttgcgggcggattcctggttcagcggggtctccctggagccggcggccgcgtccgcgccgctgctgcctggctcgctggcggcggggtcgggggctgccggagctgactccatgttttttcccaatgtagagatcgctggagatggcgagctccgagactccctctatcttctgttttcagagcaactctatggtaccaaaaaaaaaaaaaaaaaaaaaaaaaaaaaaaaaaaaaaaaaaagaaggagaaggcgaccggcgaaagcaggagggaaaaagcaggcggcggcgggcgggcaagcaaaagcgcgagggagcgcgcggagtgtctgggtggacgtgtgtgtgcgcccgaaaggggacaagaggcgggtctggccacaggcagcgctagcgagagcttctccagccggcccccacacccacattccccaccctccagaccccagaccgagagccacagactggctgccaattttgggaggtggggaaaagaggggaggaggagaacagagcctcccgcgccccaatcctcccctctccccagcccagggacagaaattaaaatcggtgagatgattccgtgcctacttctgagactctctcgggaacagaactcgtccccatccgctgccagcttgggtagagacaaatccgattgtccacgtccacgttgggaaatcgcaggtagccccctgccagccctgccgagggctgaggagaaactaaaaaggaattagaacggggctgacatcccaaggaaggcggaggatgggaggacgtggcactttttactttgggatgggacggccagtgggtttccaatcttggttaaagacatctgtgtctaaaacagattttgtgaatctagaagcgccatggacagtttctggcatggttgaaagaggtcgctttcagctcctttgctgtttgtccgcgaaggatccagaaaccatttggcagggcattttctactgaagaaaactttggcctgtttggtcgacaactatctaagctggataaaacatgccacgctgcatctagctcaagcgtggctgctaattgtcaattcccactggtacttttcctattaaatgtacagtctcatccataaaaggtagatatactggagaggcattactaatgcccggataacattcagataattaacagctcctaataattcgtattattataggcatcattctacaccctcctcccattgaaatacattcatcccctagtaggtacctaaaactccaggaaagcagataattgcatcatcgttaccttgactgcaaactccaagatgaaggaacaatacaaattgaaagaatggaaaatactccaatggtagtagcctgatttgtctgccttcatactcaatctaccactttcttttgcctgcgaagacactgtggaaatacgccccaccttcctttcaaaaggatccaaaattttgacaataaataatattattagaggccagaaggtggcataaatatatgtgcttcagaacgtggggtaggcggagggaattgggggacatttttcttttgctaacttcctggtttggaaaaatgctttaaaaaatagtaagtgcgggaaacccagttagctaatccttcagaggaaccgccatatgccaaatttcacacatagtttctgttactgttactgatcttgatcttatttcaa

SEQ ID NO: 522 - DNA, 455917 bp, Homo sapiens
  source 1..455917: mol_type = genomic DNA
gctggtggaattcagggtgctaatcagaccaccttaaaatagggagagtttcccaaatatcctggtgggccagtgtgctcacagggcttagaattggaagagggaggcaggagggctgggcggaggagagggtgtgagaactccacctgccactgctgaatttgcaggagggagggagggaccacgagccaccaagcgcagatggcctctggaagctggaagaaaatcggattctccctgagagcctctggaaggaggcagccctgcccacataccggttttagttcagagagccctgtcttggacgtgtgacccacagagctgtaagacagtagaatatgctgctgttttagatttgctatggcagatatagaaaatgatacacagaggatgtaagaggcatttttttcaaatgatgcctctttcagtaggcattttttgggcacttctgggtacagcaggaggcaggatttcttctgcatctattgtttgtcctgcaatttcctcagtgggatccagggctcctgcctacacagtgagtctcacagatttcagcaaggcccccttcaccctgctgggagagcagctcagaaaatggggcatcctactacaggagcaaaggtgtgtgtgtgtgcctgtgtcagtatggtgttttgtgtgtgtgtgtgtgtgctgcttgctgacacatgctggttaggaatttaccaaataggaagaagaaattaggttggagagccaaggaccaacagtgcagactggctttatgtctgtattaagaagggatgggcatgctgaggccaggtggcaaagcacaggagacacagtgaggtaaaaatcctattcccagggccatgtgctgggcacctgctttgctgcacaagatgaccgtccactgtctcctgccagccccagatccatcacacagctgggctcctctcaggggtgcatcccccacacacacacacaggccctaatgcacacacagataaacatacatccatatgttcacatgtgcatatgtgctctcatgcacgtttatgcatgtatacacatgcatgaaatcatacttccacatatacacacataagcacacacgtacacacatgcatatgcatgaactcacccacccacacacctgtgcacacacacataagcatacatgtgtacacactcatgaactcacccgcctacacatgcgcacatgtgcacacacaagcacacacacacacgtgcatacacatgcatgaactcacccacttacacacgcacacatgtgcacctacacatatgtacatacacacatatgcatgagctcacccacctgcacacacccacgcacagggctctgagttggagtggtcgtgatgctgcttcacctccccatgaggagtcatatggtagcagcagaggtggtcatgacctgaagccagcgggaggggccagaggagtggggagctatccagactgttattggtaacaacacagaaagtccaaaggttattgttaggctagaaaaagattacacttcataaaaccatgtttattcaaaaaaatctattcagaaagtctggaaagcgtaataaatatctgtacagtggccacccatctcaaacatgaattacaaagcaggaacataaaaatgatgtgtaaacataactgctgagccagtgaacaaagtgctgagtcaggagcgaggcagagaagcgtgctcagtagaacgacacagatgctgcagcctccgtcctcagcccctcaagctgcgctggagtccaccttccgccctctccacaccgctcagggaccggcagcgtccttctccattctcgaatttgcatgacgcttagaaaggtaggaggcagcaaaacgtgtcagaaatgaacggagtgcaaatcaaactttgccatgtgcttgagagaatcagtaaagcgttaggtaaaaatcccaagtgcagctttaggataacaccatttaatgaacaatactggataacattaagtactattatcactttaaaattcaaacaatcttccaaacatcaatacatacacagttagtttaaaatcacagacaaatcggacttgagggtaaaagtgaaatcctcacctcttgcccatgtttgactttgggatggaattcagcaaagctctcccactgcagattgggagaatcaggtatttctcccacatggggggctgccagggaaggaggaccctatagggtggccagcaaggggccactggcggtaggtcaggaagcctgagatctagggttcaatgtgtttataagttctgtgattttcatgacccgggggtggggggttgggttatgatgaactgtgtgaggaaggagagccagttaacttttggggaggtctatgtcatttgtgcaaatcatacggagcatttcattcgttgtggaggtgcgctgagctggcaaaatgcgaattctaagaacaccttcatttacatgtcgactgctgcttgaaagcagtcacttgctatttcactaaggtttttgaaagcttagtttaacatatgataccataacttctttaggctgacttttgtggaaggatgtcaagtatcattttgttctggatatgggagggaaagtagaggtatttcacagacactcagcggagcagggccaagccagtgttctcctccgctgatgcacatcaaatacatgtaaggacagagctcgctgtgatggggagtctcgtcggtccctttggcattcttagagttcagaagctaagtctgtacaaactgggatgactgaaaaagaccatgagctggtgccccatgggcacacaaggagggaaaaccgtggccgctttctcacggatgctttccctttcacttcccccacttctcactccctgcaccagaacccactgactttaagcaaacagacaggcctgcacaccaagccaggccaaagggtccgggcagctgatgggggaatcgttgcctgtgtagcaagcagaaaaggtgatgacttttgttcatttctgggaggacagattgtgtgacctcaggattatccacttcttcctaagtttctaaaaagaagtgaaataattaagacctaaaaagcaaattcatcatggtggaagtcgttctagccttgggaaaaagcatcttctatggagaaaatgtgaggaataccctgtgggcactatggaaacaggtattcagtccgacttgctccttttatgttttgtggttctctaagaaaaaaaaaatccacatggattaaagcttgtgaaacaagtttatattttaaggtctgaaaacaatcagaccaagctaaggagttatttttcagaacgcagcacattttttctttatttttttttttttagttgggtacgagaatcgagatggagggggaacaaaacccaacaaaataacatcttcttagggaaaacctggctgtggccagcgggcacctcctgaagccctgcttgctgcagaggcgccgctcttcagtgatgcagggtgaggggctgagcggcgcctcctcccatctagtctgcttgggggccgccagggagcatcttcaacacccttacaggacaatgaaggacccgtgtgttccctctgccggctggactgggcgtcgatcctgctgcccggaacctctcactcgattttactcaatgaagtagagcacagcatggcctaaatgccccacacccgccctgtgtgcacacccaggggaatacggatcagtgtgaaaaaacagatctgtgcaacagagacacaaaacgcaacacaaagccacagcatctacaaagtgcatcgctcctgtccacgctgatctccgctgccctcccacctgtgcctctgcccctcagtctgctgggtggggcctgtgtctccctccagcctccagctggactgagaaggtttgggtgggaagccacagagctccatttctccaattcacagtttctccacagaccagaaaaatcgaagtgaacacagcaaaaccacagctttaggtgagcacacaggaagccgacacagggctgagcaggtgcgagaacccacgactccctgcaaagcctccagatagctgtgtggccacgggagctggggacagacggcagcccagtgcgcttggccccccggggaaagccgagactggaggtggacacaggctcctccgagaggcacccccttccatcctggtgacacggagctctcaaggcaaagatccagcctgccttcctctcgtctgggctcttactcctcatttgaatctgggacagaggaaaggatgggctacccagcacctcaggcaaaaactgaagggcgaggaggaaacggctctttggattattttgggcagaaccaggcatctcctcctggacgccacagtgccaaccccgtcatccagcccgtggggagccccgggatgccaggtcaccccagccctctggggccctgcaaccaccaatggctgcgccctcgcactgccactttcccaccgggtacctgggacgtgggtgtcgggagtctgaccaaaccgaccggcttcataattggaaaacagatctctcggcagaaacagaagccatgtatgagaggacccgcgggctctgaaagaagcccccggcctcgcacgggcacgcgaggtgaaggggcgcatttggtttcgcttgggagaaaagagagcgggcggggaggctggcgcagtgaggcttggagaagcccccaggtcaggaccctctccggggctgaaaaagaaaacacggacacggcgagggcgggcgccgcctccctgctggacttgtggtcactctgggtgccagacgggctccgaggccggggtctgtgagcccacgaggatgctggcaggggacgctggggccagggtcccacccgctacagccgcgtggacgtgagtctcttcatgcctctgcgctgagccaggttggatgacagcacgggctccagccgcggggcctgaggtgttctgtttagagcaaagtaggtggcggccatcgcgccctgcaaaacagaagacaagggtgagagccgcggcgcctcactccaggggttgagccggagcccggggcctccatgggcctcagctgcccccaggcaacgtgggagaaaccagagcttccccagggtccctggagcatggagtgctgttagcctgccgccaggggccagcacacgtgggccccaggagacaggggccctgtctcctgcacctgccccccccaccccatgccaccctggcactgtgcttgtgccttgggggaaaatgttttggacgcttgtggagcccccaggctgaggtcacgtgatcccctgcattctgacagtgaggccaggtctgttttggggctcgctgggtcctaggggacacagcgaatgccagggccagtcaccctggactttggccactgttgaggagtctggactcatttggaggaacaggcatatcctggagtgaatccaaattctcagaatggatctggagggggcggctcttaactggatcatgcctattcctgctggggtgggacagtctacacttttcagaaaaggagtcccacccagaggatggggtgcctgagaggctactgctgcctgaatgtaagtcacttatgaaggggactttttttgcatgtgtggcctagaatagaggctttgaacttgagtggaacagccacaccagctgccaccacgtcagcagaggctgccacctactcaggtaggagccctgtgcaatactgcacgtgtctggtgaagtgcacgaaggtaggtgggccggcggtgcagtttggggctgctatgggctctttctctgcactctgtggtttcttcggagtgattgcaaggtatcaggctcttttctgggtttcccattcccaccactctgtcctcactgtcgcctgccggtaccttcaccaggtgcacgtcctgtcggctgagctggtttggggacaggtactctctgttgaccacccacgggtgtttgagcacttgcatcgccgtcaggcgctgatgagggtccacgtggagcatcttggacacgacgtcctgccagggaaggtcatgagagtcggggggatggttggatcatttgtgctgggtcagagagcctccccagcagaactcctctccctctatggcaacacccaaccactatgctgagtgtgggtctttgcattttggggtcatgttcactttcaggtttagaagtatgtcaatggtttttagctttaaatattaccaaacttggaagttcactgaaggtttatcttttattaaatatttcatgtctaaaaagttaaatgtggaaatattagatgatgcatgtaaatcgatgaaacactgtttcttgtaacaattatatctttccaaagggaaaagctgaaataattaatattccacaggtagaaatcaattcataatgatgcacatacttacattttttatcaggactacccataaatatttactacaaataatcagaaaccgcaaaatctacaatctggagccatcagatatgtccagtgggttcatgtgcaataatggtatttttccatttcattgtaaagtcgtagcagtaaaaacctctaaaacaagattctacatgtgtgtacacatgcacatacaatacagtgcacattctattacagtgaattacatttgcagagtacttggttacagtgtgaattacatttgcggacaaacctgatgcttctgctctaatcaccataatcatccttgaggtaaatggggcaaatattacttttcctaatttgcagatgaagacattactgcctgaggaagatccaagatgagaatccatattctctccactagcctaccctccttccttagtgttcccaccacatttgaagaggtaataaaatgaattagaatgcggctgggcgcgttggctcatgcctgtaatcctagcactctgggaggctgaggcaggtggatcacttgaggttaggagtttgagaccagcctggccaacatggtgaaaccccgtctcttctaaaaatacaaaaatgagctgggtgtggtggcatgcgcctataatcccagctacctggggggctgaggcaggagaatcacttgagcccaggaggcagaggttggagtgagctgagattgcaccattgcactccagagtgggttacatggcaagagtccatctcaaacaaacaaacaaacaaaaaagaatgcatatagaatgtgaagttgaattactcattagaattttgggtcatgaaacaactaagaaatactatgcacaataacaatatcttttttatacagaaaaatctaatgccttttgatatttgataacattgaccttggtaatttcttgaaacaagtatctcctagaaaaatgagtgttgtcattttcaggtgtaaaaacaaaagcctttagggctttaataactcttttcacgatcttatagtcatgacactgagagaagcagtatttttacttcatacctgtaggatgtggagaaagacatactaatttgtagctttgctggtgtttggaggactggaggttctgttgtgtgctaagtaagagaaaggaagaggcacaggggaaagacgggggatgtggtggtggtagggactggtggtgaagggcaggaagggttggtgaggccctgtgaggcggcagagacctctgcctgcagcagcgatcttgacaatgtgcccttgtccttgactttgctccttttccaacaccttctccctgctcccatgccagcttccaagatggccttccagacacaccaccagcacccacgtcctagtctgaggctctattttgggaaccagaactaagacatctacactcatttaagacaaagtgagggtgtggacaggagcatttggactgtcagggtctgacatctgggatatgctcactaaatgccagctgccatcacctctgccaccacctccaccatcacccttaccatcattcctccatcacccccaccataatcttcaccatcacctccacaatcatcctcaccgtccttcctccatcacccccaccattaccctcaccacaatcaccttcaccatcatcttcaccatctccaccatcatcctcaccatcctcctccatcacccccaccattacgctcaccatcatcttcaccacctccaccatcatcctcaccatctccaccatcaccctcaccatccttcctccatcacctccaccatccaccctcaccatccttcatcacccccaccatcaccctcaccatcatcttcaccaccacctccaccatcaccctcgccatcctttctccatcaaccctaccatcaccctcgccatcatcttcaccaccacctccaccatcaccctcaccattttttctctgtcacctctgccgtcacccttgccatccctcctccatcacctctaccatcaccctccaccatcatctctgccattaccttccattatcttcaccatcacctccactatcatctctgccattaccctcattagcctcaccatcatccccatcacctccaccattacctccacaatcactaccatcatctctcactatcatctcccaccactcccaccgtcacctccatgatcactgccaccacctctgccacttttgccatcccttcatcacctccatcatttcctaccatcacctccaaaatgatcacctccacgatcactcccgccacctctgccaccacttctgtcatccctccaccatcagctccatccctgctcccaccattacctccaccatcagctccatccctgctcccaccattacctccaccatcatctccacaatcgtcacctccaccatccctccacaatcacctccatcatcactcctgccattatctccaccatcatttccacaatcattccctccaccatgccttcaccatcacctccatcatcgctgtcgccacctctgccaccacttctgccatccctacaccatcacctccatcatcattcccgccattacctccaccatcatctctacaatcatcacctccacgctcactgcatgaagttgcactgagatgtcaacagcagaattggaatcagagcccctgactccttctctttcagcccttttacatgaacacgggaacagctgttggtgctgcttaccagtggctggattatgatttactattggattagagaggaatttgatgatgccaagtaaaaaagcgtctgatgggcaaacgaaataaggccggtcataaactgtgtggactgcagacaaggccaaattcaaagtattttacaagaacagaagtatacctctggacaagagctctacttgtttgtttggtttatgaacatgcagggcaatcattctgcaatatcactaaaagcatggtggttaattttatatgtcatcatggctgggttatgttacccagtctagaggttgctgtgaaggtgtttttcaggatgtggttaacacttaagtcagtcgacttgagtaaagcagttaccctgcacaatgtgggtcagcctcatccaatcagtggaaggcctccttaggaaaaagactgctcccctgaggaagagggaattctgtggcagatagcctgtggtgggcaactgccccatccatttctccttggggctccagcctgccggctgccctgcagtcacagacttccccgtccccacaatcacgtgagccaatttcttacaaataaatctctctctctatacacacacacacacacacacacacacacacacgcacgcatgttctgtttgtttctttggagaaccctgcataagataccaagatagtggaaaatgtgaaaatgctaaaaatgtttttgaaaataatgtttttagatgaaaggcttaaaagatgccgaggataaggccaggtgtggtggctcatacctgtaatcccagcaatttgggaggctgaggtgggtggatcacttgaggtcaggagttcaagaccagcctggccaacatggtgaaacaaaaaagttttagtacaaaacttttttgtactaaaaatacaaaagagttagtcgggtgtggtcgcacacgcctgtagtcccagctacttgggaggctgagacaggagaattacttgaacccaggaggcagaggctgcagtgagccaagattgtgccactgcactccagcctgggtgagacagagcgagactccatttcaagaaaaaaaaaaaaatatgctgaggataaaatacctatactacttacataaaacctatcccctggcttcctcagaaatcatatggctatttcagaatctgaatatttaaaagcaacgctgggacatgtactcactttagctgcgtcagatatcgagtcccagtttcccccagaaagggcatacttcccactgccgatccgcgccagaatctcctcaggggtatcgtctggcccatttgcaaaaggggtaaatctgtataattagacaaatttgtggtaatgagcttgtattttacaacctaaaataaagtttgcaagttgatatcaccccttggctgttcaaaggaatagcactttgcttctccctcctctgctctgaagccaggattcatgggaaagcggaacttacctctaacactatgcccgttttccttccttagcaattgggtggctagaggttgatgggcaagtgggagagccctgtgagacctgtgctgtatcccctccggacccaggtaaactgggatggggtggcctagtgagttgcctggtgccgtggtttccacggtgatggtgtggcatcatgcgagagagcctgagacgtggagtctgagagacccacggtggatgtattcccaactctgtgttctttgacaagttaactttttgagcctccactgcaaatgcagagtgtatgcacaaatacacatacatgcttggtgcagctctggccatattccaagcgcgtgggaggtgttcatggtgtcccaccttaaaacacacccacacactcctaggaaaggaaggacacgtgtgctgccagcgcttcctctagtgggaaagtgtgtgatctagttttccgtataggcaaagtgagtattagaagcgtcacaaagtaacctgactgtggtattggtaagaaactgaggttccttcctttgctactgcagtcctcagggtgcggcttcagggcctgatttactctccttctgctgtggacactacctgttgacttatgatgaaataagtgaaaagcaggccaagctcattcattctcatgagggcattcaagccattttgctacagcaaacaggattcgatggtctagggttcttttctttttgcctccattcaagtatttaataaacgtaataggaaccagcggatcttgtaagatcctagaccttcctgcctagaagcaaccatggtgtgtcctcttctcactcaggggagagggaagggaggctggtacaggttaaagtgtttagcccagagtcacggctagtggcgagtggggctcagatggaagtcagctgtctggatggcaggcccaggccactttctgtaacaccacgtgtcttaccacaatgaaccggcccgtgcatgactcatgaccacgaaacccaggtacagatgctgtttgaccctgaagctgctatggggctttcggtttaagaggatgtctggaaggcacatctgttgctaccttttaaaacagtggcaggtgcagcagagagaatggggactatgctggcaaaagacttgatgttttgttcatgagctgagtttaaagaaaatgggtggctacatttcttgtccttgttgttcagttgtcctgaggggctaagaaagtctgcgagtgttcactcaaggcctgggagtgtttgcatacacgttgggtttgcccacatgcgcacactaggacagggctggccctggtcccctgacagatcagccactgaggctgctgccctgtgtctcctcctgacacctgtttgaggtgactgcttaccctgccagcatggtgtacaacaggatccccaaactccagatgtcacacgccgcatcatagccttgacgcttcaggacctaggagggaacgacaggacaccggcacgcccttcactaaggacattcagattgacagcacgtttctccagcggcatcctacgccggcaagctggggaccaggaggagggcggtgccatgtcttcggtgtgaccactgtttcttaaggcaaagccaaccctaaggtactgcagtgggactcctcccaggccagccacatggtaaactagtactctttccagacacatgacagacaggctgaaaaggagggccttaatttttaaggcagaaggatttttctgttacggtaaaatatgtatgacataaaattgaccatcaaagccctttttaagtgcacagtttagcagcattaagcccatttacattgtggtgccaacatcaccaccatccatccacagagcatttcaccttcccaaactgaaactctgtccccattaaacaacaactccctgtcccccagcccccaacacctacccttctactgtccgtctgtgtgaatctgactcctccagggacctcataggagtggaattatgcaatgtttgtctttctgtgactggcccatttcacttagtataacaccctaagcttcctccaggggtcagaagttccttccttctgcaggctggacaatgttccgctgtgtgtgcatgccacgttttgcttacccattcatccaccgagggacactctcgtggcttccaccttttggctgttgtgaatagtgctgctatgaacatgggtggacacatgtctctttgcgtccctgccttcaattcttttgggtatatacccagaagttccattctgggctacgtgataacatttaatttttttgaagaactgttaaagcagcaaaacttgtatgcatcctaggattacatacttcagtagagggcaatcctctgatatagttacagttgaataacaacaaaggaagccacaatggtgctcatggattactgcagatgactggatttagcattaaatatcgagtcgggagagctcggctcaatttccttagagatgagagcaaggagcctgtccttttctctgtatcgctgctaccatgtgtgagcctgcaccatggaggggaccagccagcgcatgctgaatgaatgtggtgctcatggtgcaagcctcacttcctaatccatcagcggggtgaccttcagaagtcacttacacacatggagcttgtgctttctgactctgtgaaacatggttaatagattttaccctgcctactttgtatggtggatgagagtgaaagtaaaaaaagttggtaaaagtgctttgtaaatggcaaaggaatatcacaacctagggcattctacaatcaataaaatcaatattgtgggagaccagaatatgccaccccaaaatatgctgcataggcgtgaggggcgctgagctgaagatacataagaagcagcagatgcaggagagctctgtgtcctccatttgtctaaaatcaggacatggattaagacaaaaggtacctacccccaaccagagaggacaaaggcttcccctagggacagctttggatgcatgtggtcccacctgggaccagcctccataggccagccctgcacctccccaagctgcagcccctggagaccctaaccctcttcctttgtcttgccaggtctctaaaaattctctgttctttgttgcagataccatgtaggctggattcaaagccacctctgtgaggatgactccttctctgggcatctcgcatgcataaatgagaagatgtgtgttaataaacttctttttctcttgttaatctgtcttttgttacaggggtctggtccagctaagaacttatgagggatgaggaaaacgtcattttcctcccccataatattatcaatattaatattgattaagtaaggcatgaacagaggcttataacctggttactttcattttttttagtttttattttttgagacggagtcctgctctttcaaccaggctggagtgcagtggcgtgatctcggctcactgcaacctccacttcccgggttcaagcgattctcctgcctcagcctcctgagtagctgggactgtgggcacacaccaccacacctggctaatttttgtatttttagtagagacggggtttcaccatgttggccaggctggtctccaactcctgacctcaggtgatccacctgcctcggcctcccaaagtgctgggattacaggcgtgagccaccgcacccagccaaacttggttatttttaaaggggccacaggttgctcaagtgtctggatgacccctgcataacctaaaacagcctctcagtccagcccctggctgcacatccgttcacgtctcagcacgcagaagcatctttgcaatggaccagtggccctgggtgacctcttaaacaactccaagacccacagtgagatgccaggcgcctcagacctggctgctcgcttgactcccctcccatcggagcagctctggtccagttccatcaagaacccacgggatccacacagactctgaagtccgccttccttcccagttccctcctcccctgtcccattggcaacatcagccacagcccttcccttcctctctttaccactggcttttctcaaaggcaagaaattgggcttagatttataaacacatccttgaattcagaacctaatggaacttgttcccgggaaatgtgaaaagagagaagttcaccaggtgcctgctagctgctccgagcggggctgggagcagacacagacactgaacaacgtaagctttcagtggcaaatcaccccggagccctgcggttctcaatctgacagctgctgacttgctgctgtcggggaaccaatctggagtgagaattggggtgcagagaaaatccgtaaacttagttgctccctgcgctatgacggatccatttcccatcccaggtgaaccgcagctctgcgtcctggttgtataaggagactactgcatcatctctctaacttggaataaatatgcagatttcatccaaattgtctacagaagacaattttacataaaaatgttactgttgaaaagttttttcaaatgggaaaatgagaatgataagaacaactacgtttaagcaagattggcccctggctcaagagactgaaggttctcgtttctgtttcccaacaccactgctgacgcagctcaagccgcctctgacatccccgctgtccggtggctctgcagtgggagggggcagagcctgtctttgcggatagagaggcctgggtctgcagtcggggaatgctcacctccggggccacgaaattggccgtgtagcagggtgtcatgagcagcccgttccccgcgcgcagctgcttggcaaagccgaagtcgcagactcggatggattctgggctccccgactcatccctgtacaggatgttactcggcttcaggtctcgatgaacaacctgcaagacagaaggcacagtgcctacttgggggctgaggactgagcaggagagggagggcaggtgcatttggaggggagggtgcatttgggaactgtcttcctagcaggtcctgcaagcaggcaacaggccaacagtgtcaacagctgctgtcttctccagagggccccccaccttctcccattctcctgtggtggtcactcacttctgagctcctggtgtcacctgcttttacagtgaatgaatatttgagtaaataagtgagcacctctccaagttgaggccgcagcttactggagctgtcacataaaaggaaatgtggtgagctctggagataggaatgaaaagcattttaaagatgatattcattcaataactactccctgtgtgcccacccccatgcactgtgaggtgttggagcagcaccagtgagcagcacagatcaggcacctgctgtcctgggtgcagcaactcgttggggagacggaccagggccacgcgatcatgcagtcactctgcaatcatgctctgaggcctcccatggaggactgcgctggctgcaatgatggtggggccagcacacctcaaagcaaagcagctatttagggcacaaagcaatgtgttctgaggggacagagggccattgtgaggacgtgtggcgtgcctttgtacagcttggatcctgaacatctcaattgtcctaatgaaatccagtgggaggatgtagaagggaattaaagggacacactccagcagtcaggcctggtttacagaggtcctgatggcaaggcaatcaaagactgtggctttacttccattacctcccctcattaaatacaagcagatctgcagaaaacatcatccaaagggcttcccctgagtttgactgtactgggaaaacctggaagtaagtgcttaatgctcaagactgggtgaccacacagaaaagaccccagtgtgtggtcctggaagaatattcccgtttggagatgactgcattctgaaaactcaggactacgcacacagctggctaagacagtatttcctgcttcaggagaaacactgggaagagatggcgcacagaggaaacatgtgatacggtgcagctgcctccctgtgaggccagggctgggaccaagagcactgcctggaaccagagagtgggagtccaaccccactggccacctactcatgtgtgaccttggccaagatactcaaactcctgtgcccctcgcctgcacagtgggtgtgatctagggttagggagtcagtgaatgaagagcttgaagtgcagcctggatcacggtgaggcccacgtgaacctcaggcatcaccgtcatccctgcctcagcgtccctgcgctccggttaatgaattctttacccgttgcaagtaacgaaaattcttaatttcttttgattaaggccaaagtatttttttggctaaagttggtaaaaatgattttagaccctcaaagggtagcagagtcagccaccccaaaatatgctgctttggcataaggattatttggagctgaaaacaactgaaaagatgcagatataagcaaagctctctgccctccccttctttacctaaaaggaggatataaatgggtaaaggtgtccctcctgtcctctctgcctggaaggatggaagggaaactcctctagatgcttacagcctggagaagcttccagaataatctctataacaaatgttcctaactagccctcatcttctgttagtttcccatagacttagcttcccacagtctgctgccttagaaacacagtcctttttctttgtcttctttaaaaattattattctttttaaaatttaaaaaattttaaaatttgagctcttttagggctcctgaaggaagcactaaacatggaaaggaacaacaggtaccagccactgcaaaataatgccaaaatgtaaagaccatcgagactaggaagaaaccgcatcaactaatgagcaaaataaccagctaacatcgtaatgacaggatcaaattcacacataacaatattacctttaaatgtaaatggactaaatgctccaattaaaagacacagactggcaaattggatagagtgtcaagacccatcagtgtgctgtattcaggaaacgcatctcacgtgcagagacacacataggctcaaaataaaaggatggaggaagatctaccaagcaaatggaaaacaaaaaaaaggcaggggttgcaatcctagtctctgataaaacagactttaaaccaacaaagatcaaaagagacaaagaaggccattacataatggtaaagggatcaattcaacaagaagagctaactatcctaaatatatatgcacccaatacaggagcacccagattcataaagcaagtcctgaatcacctacaaagagacttagactcccacacaataataatgggagactttaacaccccactgtcaacattagacagatcaacgagacagaaagttaacagggatacccaggaattgaactcagctctgcaccaagcagacctaatagacatctacagaactctccaccccaaatcaacagaatatacatttttttcagcaccacaccacacctattccaaaattgaccacatagttggaagtaaagctctcctcagcaaatgtaaaagaagagaaattataacaaactatctctcagaccacagtgcaatcaaactagaactcaggattaagaaactcactcaaaacctctcaactacatggaaactgaacaacctgctcctgaatgactactgggtacataacgaaatgaaggcagaaataaagatgttctttgaaaccaacgagaacaaagacacaacataccagaatctctgggacacattcaaagcagtgtgtagagggaaatttatagcactaaatgcccacaagagaaaggaggaaagatccaaaattgacactctaacatcacaattaaaagaactagaaaagcaagagcaaacacattcaaaagctagcagaaggcaagaaataactaaaatcagagcagaactgaaggaatagagacacaaaaagcccttcaaaaaattaatgaatccaggagctggttttttgaaaggatcaacaaaattgatagactgctagcaagactaataaagaaaaaaagagagaagaatcaaatagacacaataaaaaatgataaaggggatatcaccaccgatcccacagaaatacaaactaccatcagagaatactacaaacacctctacgcaaataaactagaaaatctagaagaaatggataaattcctcgacacatacaccctcccaagactaaaccaggaagaagttgaatctctgaatagaccaataacaggctctgaaattgtggcaataatcaacagcttaccaaccaaaagagtccaggaccagatggattcacagccgaattctaccagaggtacaaggaggaactggtaccattccttctgaaactattccaatcaatagaaaaagagggaatcctccctaactcattttatgaggccagcatcatcctgataccaaagcctggcagagacacaaccaaaaaagagaattttagaccaatatccttgatgaacattgatgcaaaaatcctcaataaaatactggcaaaccgaatccagcagcatatcaaaaagcttatccaccatgatcaagtgggcttcatccctgggatgcaaggctggttcaacatatgcaaatcaataaatgtaatccagcatataaacagaaccaaagacaaaaaccacatgattatctcaatagatgcagaaaaggcctttgacaaaattcaacaacccttcatgctaaaaactctcaataaattaggtattgatgggacgtatctcaaaataataagagctatcgatgacaaacccacagccaatatcatactgaatgagcaaaaactggaagcattccctttgaaaactggcacaagacagggatgccctctctcatcactcctattcaacatagtgttggaagttctggccagggcaattaggcaggagaaggaaataaagggtattcaattaggaaaagaggaagtcaaattgtccctgtttgcagatgacatgattgtatatctagaaaaccccactgtctcagcccaaaatctctttaagctgataagcaacttcagcaaagtctcaggatacaaaatcaatgtacaaaaatcacaagcattcttatacaccaataacagacaaccagagagccaaatcatgagtgaactcccattcacaattgcttcaaagagaataaaatacctaggaatccaacttacaagggacgtgaaggacctcttcaaggagaactacaaaccactgctcaatgaaataaaaggatacaaacaaatggaagaacattccatgctcatgggtaggaagaatcaatatcgtgaaaatggccatactgcccaagctaatttatagattcaatgccatcccgatcaagctaccaatgactttcttcacagaattggaaaaaactactttaaagttcatatggaaccaaaaaagagccgcccgcatcgccaagtcaatcctaagccaaaagaacaaagcttgaggcatcacactacctgacttcaaactatactacaaggctacagtaaccaaaacagcatggtactggtaccaaaacagagatatagatcaatggaacagaacagagccctcagaaataacgccgcttatctacaactatctgatctttgacaaacctgagaaaaacaagcaatggggaaagggttccctatttaataaatggtgctgggaaaactggctagccatatgtagaaagctgaaactggatcccttccttacaccttatacaaaaattaattcaagatggattaaagacttaaatgttagacctaaaaccataaaaaccctagaagaaaacctaggcattaccattcaggacataggcatgggcaaggacttcatgtctaaaacaccaaaagcaatggcaacaaaagccaaaattgacaaatgggatctaattaaactaaagagcttctgcacagcaaaagaaactaccatcagagtgaacaggcaacctacaaaatgggagaaaattttcgcaacctactcatctgacaaagggctaatatccagaatctacaatgaactcaaacaaatttacaagaaaaaaaaaaacaaccccatcaaaaagtgggcgaaggacatgaacagacacttctcaaaagaagacatttatgcagccaaaaaacacatgaaaaaatgctcaccatcactggccatcagagaaatgcaaatcaaaaccacaaatcaaaaccacttttcattaaaaagttaggaaacaacaggtgctggagaggatgtggagaaataggaacacttttacactgttggtgggactgtaaactagttcaaccattgtggaagtcagtgtggcgattcctcagggatctagaactagaaataccatttgacccagccatcccattactgggtatatacccaaaggactataaatcatgctgctataaagacacatgcacacgtatgtttattgtggcactattcacaatagcaaagacttggaaccaacccaaatgttcaacaatgatagactggattaagaaaatgtggcacatgtacaccatggaatactatgcagccataaaaaatgatgagttcatgtcctttgtagggacatggatgaaattggagatcatcattctcagtaaaccgtcgcaaggacaaaaaaccaaacactgcatgttctcactcatacgtgggaattgaacaatgagaacacatggacacaggaagggaaacatcatactctggggactgttgtggggtggggggagggggggagggatagcattaggagatatacctaatgctaaatgacgagttaatgggtgcagcacaccagcatggcacatgtatacatatgtaactaacctgcacattgtgcacatgtacctaaaacttaaagtataataataataaaattaaaaaaaaatttttaaatttgagacagagttttgctctgtcgcccacgctgaagtgcagtggcgtgatcttggctcattgcaacctctgcctcccaggttgaagcgattctcatgcctctgtctcctgagtagctgggattacaggtgtgtgccaccaagcctggctaatttttgtattttcagtagagatggggttttgccatgttggccaggctggtctcaaattcttgacctcaggtgatccacctgcatcagcctcccaaagtgctgggattacacgtatgagccactgcatccagcaaaattattgttcttttgttaaaatgctatataagctcaagttctaacaactccttggagttattcatggctgggtgctcccgtgtgtatgtgagatgcacatgttaataaacttctgtttttctcttgttaacctgtctttggccagtcttgtttatagggcctccaccgaagaactaagatgggcagagggaaaaaagaatttttcttttctttttttttttttgagatggagtctcgtcctgtcacgcaggctggagtgcaatggtgctatctcagctcactgcaacctccgcctcctgggttgaaataattctcctgcctcagcctcccgagtagctaggattgcaggtgtgtgccatcatgcccagctaattttttttttgttgttgttatttttagtagagacagggtttcaccatgttggctaggctggtcgcgaactcctgacctcgtgatctgcccgccttggcctctcaaagtgctgggattacaggtgtgagccactgcacccggctgggaagagaatttttcttcccttgcaccgtcactgagcctccagacacaagagagacgatggtggcacggaaggaattccaggacaatccgcgttctcagctcttgaacccataaacccttgtggttttggttcctgccctgaagctccctcctccccgaaggctgccccaggcatggctcctaccccctgggaatggaggtagtccatggtcttggtgatggtgcacaggacgtcactggcttcgcgctccgagaagtatctctgccggaggatgcggtccaggagctccccaccacgcatcagctccattaccaggtacacaaacttgccatcatcatagacctgcggagtggagaaggggcgcacacgtcaccacggctggttgctgtgaaagagcaactactccagaggggacaggagagggaagtcagaggggagaggctgggaccacagggtcctatgggagtgcaaacaaggcttctgcagggtagaagcaaatggccattcctgtcataccatatgtgctctttttaggaagaaaacggctttaataatctgctgctaagcagggactgagtaaggacatacaagatgggcgtgtccttagctgagatgaatggcttcatgactctgccaggagatatttgttatttatttattattattattttttgagatggagtctcgctctgtcacccaggctgaagtgcagtggcgccatctcagctcactgcaacctccagctcctcctgggttcaagcgattctcctgccttagcctcccgagtagctgggattataggtgcacgtcaccatgcccagctaatttttgtatttttagtagagacagggtttcaccatgttggccaagctggactcaaactcctggcctcaagtgatccgcctgcctcagcctcccaaagtgctgggattacaggcgtgagccatagtgcctggcctgccaggagatatttagacgttaagaaatgcaaatgttggcaaaccaccttgcaagagcagggcctcaaggcagtgcttttcaaactgtaacgtgcatccaatccaatcttggggatcttgctaaaatgcatgttctggtcctgcagactgaggtggggcctggccctccgcatttctaaccagtttcccatgatgtctgtgctgctaccgcatggacagcactgagtggccaggcgctgggagcacagagaggctaggcagagtccagggcgaagttacatatcagagccgtgctgttgcttcagagaagcaatagaaaaagatagttttctccatactggcttttatctcataaactaaataaaaacaatatgctctgattattctttttatgtttcgattttttgagatggagtctctctcagttgcccaggctggagtgcaatggtgtaatctcggttcagtgcaacctccacctcccaggttcaagcaattctcctgcctcagcctccggagtagctgggattacaggtgtgcgccaccacacccggctaattttgtatttttagtagagatggggtttcaccatgttgaccaggctggtctcaaagtgatctgccttcaggagacctcaagtgatctgcctgcctacgcctcccaaagtgctgggattacaggtgtgagccaccgcacccggcctgttcgggctattcttatgccaagcttgcatgttaagaccgtttgcacgcagcagtcactatgcatgagggaaactgaggtaggcccaatatcctgtgactctaggttcataatgctagaatcagtttggagttggagcgtgaggaggaaaattgtctcctgtctgtgctcccggatcccaaaccctgcacccccatgggcctctatgagagactccgcctgtggactgtaattcacacaagctctctcttcctctgttttacttgctccctccatgactggggcggtggctgtcaaaaagacttgagtacacagtccagcaagtcagctccaagtgactgagatatgtgggtggtggaaaccagctgagacaggcatgagatgtgagaaagcttgctctgagtgaatgggagttttgtgtcagttgaagaaacagaaggaagtggagatgctgttgcacggggaccactcacatccttgagggtgatgatgttcgggtgctggccgtaccgcaggaggatctcaatctcttccgaggggtctctcttgctcttatcaatgatctggaacaaacacagcacatggcagtgaggggtctactttaggctttcgggtggtatctgctggtggaccattgagtttggataaagtctggccccaggtggcccaatcactacaatctcacacccgaccaagagataacctgagattgtctggagattcatggcaagtcctttctttgacaactagtgtaagatttacatctacaaagaggagtacaggctgggcaaggtggctcatgcctgtaatcccagcactttgggaggccggggtgggcaggtggcttgaggtcaggagtttaagaccagccagcttggctaacatgacaaaacctggtctctactaaaaatacaaatattagccagacatggtggtgtgtgcctgtaatcccagctactcaggaggctgaggcatgagaatcacttgaacctgggaggcagaggttgcagggagctgagataatgccactgcactccagcctgggtgacagagcgagactctgtctcaaaaaaaaaaaaaaaaaaggagtacaagacttcagacatgaattttaaggtgttataaggttgggtggagacacgtgtagggagctcatgcaagtgccaccaaataacagactgtgtcccaccctcgcagtgggcaccatccacaacaagcctccagccactgtgcaccttctgccttgttccgggaattacaaaccagccacaaaatgaggtgaggcgcatggctctcaccaagagatgctggggatggtgcgcaggccagacctgccttgctgtttagacatatgcaagctcccctcccccgcccagcatctgtatccgatgtcttaggataacagataaagttgcttcaaccccatggagacatatggtttctgaggacagggtgttgggatttaagcctaccttggaaacaggaagtcgctgttggtccctggtggctaatccctctggaggtgcctaagtcccgcccttgccgcccctgctgtggggacgggaccagtgggaggagggcaccacactcatgggaaattggcaacatgcaacatgtattttgcaaacaacactcagagcagaagaaaagcgattggaaacaccttcctaaccatgatttgtactattctcacattagttcaacctaattttaaaatagtctctatttggagaccgtgcagtcattttactactagaatatgagggtgacttgcttttaacttctatcatgtcaaagtctctaggcagagctttgcataaaactctatttcgttaattttttttggagacagggtctcactctgttgcctaggttggaatacagtggtacaagcatagttcactgcaacatcaaacccctgggctcaagtgatcctcctgcctcagcctccagaataactaggactacagaggtgtgtgccaccctactcagctaatttttaaattctttgtagagatgatggggtcttgctgtgttgcccaggctggtctctaactcctggcttcaagtgatcctcctgcctcagcctcccaaagtgctgagattacaggcatgagcaactacacctggctatttctttactttagagaaccaaacgcttgggtagcatttgactcactgctcataatctgtcccctggtcacccttcgtccactccccgtcaccgttataaaaactcaccatagtgccagttctcaccccattatagtttcaaaggatgctctgccacggccaccattcagctgtgactgcatcagtggcccatgatctgtgagtcctaatagcctgcgttgtaaacaggcagaagagttagggtccctttctggacatagaatttctctccttctgctgcatttaattctactgaagttttagctaggacactaggactaattctattgccaacataaatgcatcattctcaagtagagacttttaaaacgatcattcaaggaggggtgggggactttccctaacatgccacagcctaagcaggtcctgggaggctggtcctgcactgcttgtagggaagctggctgtcaggtacccaaactcctctgctcctgtctgcctgtgggcatcccgtctatcggggccgggatcctgtctttgcaattagagaaggttaaaatacatttataaatttataaaagaattcagtagaagattttttcgcaaatatgatttcatgataaagggatgtgttcttagcatgaatctgttttatcactctcacagtggaacaagatgcagagtaaacaagaaagtgggagctttttctccaccgccacggaccatcttcaagatacaaggagtaaaaaaggccgacgcgagcaggtgcatcctacgccatcccttgttttaaaaatggagagaagaatgcagatagacgcatccatttccttgtgggtgcataaaataaccctggaaggaaggaggaaacatttaattgccttgccttcctgtgaggaggggaacagggtgcctgggggcccatgggtgggagggaaactttgctgtatccacatgaatttttaaaaattttgaaccacaagaatatattgtctattcaaaatatgaaataaagaattccaaaatttcagcttactattttgtaagctgaaattgcaggacaacgtgactattattttaaagaatctgggactacagatggctgccctctcaaccctagtatctattttatttctatgtgttcttttgttgtgagtcttcagaaaaattctgacttacaatgataagtatttgtaaacagttttcaaagacagattaccttaaactcttgcttactttaaaaactatcttaaattgtaataaaagctagcatgtatgtgcacatgtgaggcacactggatttcaacccatcggagccagtgtcctggtcatttgctagaatctgatacacatttaagcatgcatgttgactttcattacattttcaacatattagttacgcctttcaaaatcatgtaattgcttggtggaacccccaaagcacctctgtcaacaaccaaacaccacacaccagctgttcgctgaggtggcatttggggaaatggaggaaaatgaaagaagctcccaggctgaggtcctgtggggacaggagctcatctggaggagactccaaggggcccacgagtgctgctgtttctcaccacagggtagagccagcggtctttcagcaaacatctggtttgctcctgaggggaagtcacgtttgctgtctcaggcgacaacactgctgtgggtgtgggtggcttggcctgtggccatgtcacttgctggtacttgaatgtgggtgtctgcaggctcagctcccgtggagggctggaaaggtggaggaaggcgttgctcctggggaggccacgtgctgcgtggttggcggcccagccgctgagccagtctgagccccagctgagacctggcctccctgtccactccctgtggggttgcaggagctccctgggcctctctacacctagctttcttcatctgtaaaactagaaaacaccaggcactcctctggctcactgttaagattcaacaaattaatatgaatcgatcccttcatactctccctggtacacagaaagcacttggtacaagtgagttattcctattacagagataaaatagaattaccctgacaccgccaggcaagggactaagcagctgtgacctgccacgtttacagccctgaaatgctgctttcggtcctgtctgaatcctcactgcgagtccgtgccatgaagcagtgtgatgtttaaaactaatgtcagcagtagagcgtgtttcagttaaagccccagaaaaaaaaaaaaaaaaaaacctcagatgtcacaccaactgggtcaacccagaggccttaattaaaggatcgtttgcaaaggagtagagtggctggagggtcactggccggccagcaaggcacagtgtaatgccttgggggcagtcctggctctcaatgccaaagagctgcgcagggtcagtcacaggaccagaaggggctgcatggggtggggaggtgcgccctgacaggggctgtgggcagaaaggcctcggcccgacacttctcttcccactcttgtcctgtggtgtctgtctcgcactagcagaactgcccaggagccagaggcatggaagtggtccctaacagtcagcctcctggcttccttgcctcctggcctcccagcctctgaggcacagggcagcgaggagggtgggtttgcatgggaaatggcgctccccgtcctggaagggaagtcccacagactggggtctctcctgcctcagcctcccgagtagctgggattatagggcacatcctggaagggagtcgtggcgggaataggttctcacacgaccctcctgggctcccgccttcccctgacccgggagaattaatccaaatcaagccaaggctctgagatgaagtggcaaggcagttctgacccagcgtttccgtcccggatgctgtcaggaagtgctggctgcttttccctgtaactttttctgaaaaaaaaattttttttttttgcttttgtttttatttttgcatggagggtgagctatttgagcaaggtaaggctggagagtgctaacgcaggagtgggcagtgaggtgtggctacagtcctggagtacatgacctggatctgctgcgggcagccggggtttggacacactgtttaggagcaccagggagtgggccccaagtgcctgccagcgcacttcttctctatggggtcggtttcttggggttgaccgtgttggtcttactcttattagagcaagctctggtggacggcgttcctcattctgagaataatattgttttataatctttattatgcaacaaaacagggaggccttctcagcaagcgtggtgatgaacaaggcctcccctccaggctgacgctcaaataatgctgacgcgccacggagtaggagtggtgtcgtggggcgggggacaagctcgctcagctttctttttctcatctggcaacagctggttagaaaggactcctacaacctccagagaagggcattctccaggggttggccacccaccacagccggtaaataaactttccatggtgttgccaccgagcaggctgaatatttccaccttccttagagatgctgagtctaggggtctgaatatccacgaagcaattctgggttcaacatggatggcacaccaccatgatcttcctgagcacggacacatgcagccatgtgccaaacaaacactgccattcctgctggccgaaggcgacaacaggagacttcgctgctcttgataacacctttcctcctgctggccgaaggcggcaacaggagacttcaccgctctcgatacacctttctggtctttgcgtttctctaccttccctgtctttcttgtctctctccatcagtggagacaccgtctcccgggacactcagcaacctgagcagatggctttgaggcagtaactacgcgggcagtggcatgagctcacaggcttgcagaacactcccactaggcaggccatttcccttgagttgccgaaaggatcagtatcgtatttgacacaaaggtaggagagcatgtaatcatttgtaaaatttaacagacaccttctcctgtaaaattaatttaaactaatgacagagagaaagaactcctgttttatcctggtagaaaaagttaaaatttccaagctcatcagttctccttctaaaaataagctctattcatgccgaacatctgtcttaattccgtttctttttttggttggcaaattacacacacagtgtgaagatgggcacagaaacaccacgttcttttcaacggtctcacgtgagtacagactggagcctcctcaggaaggctggcccgcgctccaggcctgcgtggtcacgccgcgtcactacagttaacagctgggtgacacatattcttgcacagttctaaggatctcactttatttcttatcagattctgttgctaaagcaaactaaggtactttcaataccataacaacaaaaatttgctaccgaaaagggagagtagctgcatcttaactcatgtgcttctttctaggaaaacccagccccactgagcttgtgcggtcttcttctcctgcacgagctttcagacaattgaagggaaatttacaagtgcaacagtcagtgaacaggcacgtatattggtaccatgtgtttgaagatacaacaggccaagagaaagagccaaaccaactgtaaagctcatttaatttcagattccggagatgcactccactttttggtatagtttctggttctgtcattgacacaattcctaaatggctaagctgtgagctccctggagcaggtttgtgttctcaccttgccctgcgtctgttgcagtaaaagcgtccaattaaaaaaaaaaaattctcaatgaatgaaaaaagtaaccagcttcctgaacaaggggattgctgcagaaagaaatggattccaaaggcacgaagtgctctgttgaagaattatattataaaccccgattttaaaaatttgaatttgaaggaaagctcctgattcatattttttcttgtctttatttttaattaattaattaattaattatttgagatggagtctctctctgtcgcccaggctggagtgcatggcacaatctcggctcactgcaacttctgcctcccaggttcagatgattctcctgcctcagcctcctgagtagttcggattacaggcacgcgccaccatgcctggctaatttttgtatttttagtagagacggggcttcgccatgttggccaggctggtctcgaactcctgacctcaggtgatccaactgccttggcctttcaatgtgctgggattacaggcatgagccaccgtgcccggccatatatttttcttttaatcaacacttagcctttcactaccaaatatttatgctaaatgaagataaggagccccttcattgtgtgctgaaattgagtgagctcctgccatgtgcccgactttgttgaggtgctggaactatagcaaaagcaaagcctttgttgccctggagtggctgccctcacagggccgtgcacacagacagtgaacaacccatgcagggggaacgtgccatagggaagatgatgtgggtgaggggggctgctggctgcaaaagatggaggcggggaactaaaatcagggcatcctgtgggctttgggtgcatatttgtgttctctggttggtcctgacttggaagcagggacagaacttaggaagctgtcagtcattcatcaagtcctggccatgtggggctgactgtcacagaatttatagttcagcttcctgggctgtcactagagatagcaatctggcttcctgcaagcctgacacagctgctggcctcccgagctatgtattgtagataaaggggctggctgcaggtgtgggtcagacttctgtcgggcacccagcctggccaccatctgctgtgtatccactctcagcccccagagcccgcggaaggaaccagccttggggacactggactttagcccagtgagacagatttcagaattctgacatccagagctggaagacaataagctcaggttgttttaagccactagatgtggggtaatgtgttgcattcctaaacaataggaaactagcctgtgttgaaagaccggggagaggtttgcagtgggagagttgagagccaagttttggctggtgggtgggagcctgtgagatgggctcggggacccggtagtgggcagaaggcacatgctacatcttattgctgatgaccgtcctccgccgcatgcctgctgggaggggctgagcatacgagaaacaaaaccataagccaatcacattaagcctttctcgtttcgaaaaagcaaaagtgcagctcgctgccagcgctcatttgattttacataaacatgttcattaaggctgaaacaaatctgattttccatgtgaaaataaaatttaaaaactgttactggagttatttctaaacagaactaatatcagaatcatctgaatcatcagaattgtctattttggaaaaattggattcatcaaatgaatctttggccaacaactgtttgagaacgaagttaacatcccatgtaggaatgctacgttttctaggatttgacattatcagcaatcgattatgactatattttgtaaatggaaatgccactactaaaaacagaatgctatcgatagaatgatgtcctttgtttccaaagttggtatactagagcggtgcaaaaataataataaaagtgagatatttcgcggcaaagttatctcggggcaaacgctgcagccgcaagtgccgccggtgagtattcttggggaaaacgggcaaagggttaaatcatccagaaaggcagcttcccagtgtgtgtttcgaggagatacaaatgcccaaccaattccactgaggagcttctttgattagagaatgcctgtgcagagacacaggctggacagagcatctattctggcaggcgatacagtcattttcccgtcttcgagtctctctcttctggtggaagagaaatttatgccaccgttttcctcagtcatgcaatctgttaccaaagctgccccgtctccttccttgtccatctaaatgttgctttctttcttttctattttctattttatttaactgctcctagtcccggcctctgtgcctgtgaacgctcctttctctgtttccactgtggctgtgaaggcatctacagcctctgcctgtctctgcaccactgctgttcttgagatggttcatgttgctccttcacatagctcaactctcaactgctgtttctctttgcttcaaattttcacatgatttctatgaaaaatgcattttgatccctaaagacaggactggcctggacctctctcttcccaggtttggccacagtggtttgactcagctgcacagccacctctgttccccaagacgggtgcagctaacaccccacgtgatactgggaagccccatggtgaaaccatccactgctttctcaatggcttagaattctttgcaggacctggcactggatcctctggagtgaacttgaacacaagctcccctgagtcctctccttctccggccccgtgcggctcactgcagcgcccagcgttaggccatgggctctttcaagatgtagcttctgcaacaagcccaggtgctgccctgaggacgagcaggctgtgatccacaggagccggggctagtgctgccagtgacctcggagcacagactgaaaacagaggtctacatgaacgcagaccatcctgaatgctgtggggaaggaagctggagcagctgccgggggccgggggccgggaccctggctaggggcctcgcagctgagtgctggaggaaccaggtgcactgtgcctttggaggtgaagttagaggaagcggtccggctgccgctcagcacttacacagctgaaccatggcccacttggtggcagcaggacctttcactggggtacacccagactcataagaccaggagactcaggtgcgattttacatagagctccacttgcacctggcacaccttccccttacagcctagggactttggctatttatcaaacaatggatttttcttgcaggtcccatgacttgagctttccagctattctgaagcccagccttactgcccagccccatctgctctgaatactgcctcattctttcatggtttgggtactctgagatgcatagagcatctggctgaaacagaacactggggctccccgccttatgacgagtgagtctgctggacaggggtcgagagtgtgcactcggggtctgactgcttggacgggaacctgctctctcactgaccggctgcgacttctcgcatatgtgttgaaccgttctgagtttctgttccctcatggggataatgaaaataattacaccgtgggatgctgtgaggattaaatgacttcacacatacagagcgcttatagcagtgcttggcacgtactgagtatgaagtatttactctcgtcatcctcgtaactctcgtcaccatattctatctaacgcctgcagctcctggtctcaggaacttcagttctcgggcagtttcctcttcatatgtgtactgacgttggtgttttgcaaaagagggtcaaggtggcaaaattggcactcgaatgatgtaatgtagttttatgcctattatgacatctataataaataaaaacttcagtcattagtagagatggccaagagctctctcaaggtatgtgtattaagcttatgagaaggggagatactagtgacacaagctaacatttctgtagtgaattagctatgatatgtgtagacagttgacccttgaacaacatgggggttagaggtaccgacccctcaagaagttgaaaatgcacatataacttttgacttcgccaaaacctaactaatgtcccactgttgacttaaagctttaccagtaacataaacggtccattaacacatattttgtatttgtataattatatactgtattaagaataattatacaattatatactgtattaagaatacagtatataattctgtaataatacgatctagaggaaagaaaatgttactaagcaaatcataaggaagagaaaatacatttagtgtatgggactgtatttatggatatagtgagtttatgccatctgttcacaagatggatcgtctgtctgaaaaggggggcactcacagctgcagacctcaacctggggtacgtatcatgcaattcaacttttgttttttttggtcatgtgatgacttttctctgcctcttgggagcactcacagcgtccctagtggcacgggacttcttagtggttctatggtgttattcaaggtttatggaactgcactaaacacggtgaaaaatatgtgagaaccacaagataccattttttactgctattcccaattccctggagagacagactcctcacatggagacgaggagtgtcacaggacgtttaaagcggatccttccaacacctgagcttactacagcagcaatggaaggctgctgtgaaattcttacggtagtgccatattcgccacagttaatttgctgcagctatgatttaatgctgaatctatgtttgtttacatttatctcaactgcaaatggcgccacgtatggtctatgcttgagcacataaattttgatacattttaagtttgtataataaatctgtgtatattttatagtagaaaatgataaaatagactagcatctatgtatattttatgcatcctgacataccattttcttaactttttaaatatttctaggctatgtggtttgtctgtgagtttcttcaaattgtaacaaatctctaaaaaattttccagtatatttactgaaaaaaatctgcatacgtggatcctcacaattcaaccccgtgttgttcaagggccaactgtatatatttacatattcccccaccaatataatgccaggaatccttccatttatacaaatcagcactatctagaatatgtacctaattatgttaagcaacaaagtcctaagaataaaataaaaacaaataattccctctctcaattcttataaagtgaatacagcatctttgatggaataggaatattattttttctttcaaatacacctctccccttccttttaatcctcctggatcacgattacctccaacacttaatagtcacttctattttaatcttattttaaatgaagggtgccctaatgtgcggacagcaatgcagccatccgtcatgctattttgaagccctatacaacttcatcgcccaccactagtctccctgggttggttataaaaacaaaggcggactttagttttccattagattacttagctgttttgtcccaataaaatggcttgtagttattagaaagtagggcacatctgttcacctacaatgtgtctgataaaaggaagaggaagcgctgagggaacataatagcttttctcattcaaccatcagagcactggctgggggcaccggcagaatgcgctgcatcaagtccagcctgaaacagtgccgtgcgcgtgagaaggaagagggtcggtgtcttcccgcccgaggccggactgccccagtgaaggatcttggacgttctagtgttgtttgccgaagtcgagagggagggacaagcctgggaatccaggttgtcattcagcccacgtgaattgagcccctgctctaagctgggcactgtgttggagactgcgatagctagaattggtcttaattttagtcctaattttaggaccgattctagctgtcacttcccacaacctttggcagagtacccagcatatagcagggactcaagttaaaaatgcagctgaaaataaatgcaaagtgaacaatcttgtcgtttgatttactcaggtaaactggtttcagtagaaccttaaatgtagtttacgttattcagggtaattatggtggcaaaattagaaacctgcaaaaatgcagaaataacttaaagcaaaatataatgatattctaagaatgtgagaagtactatgattccatactcactatgaacctccatacctgaccgtcatagaggtgaagagctggccccactctcctcttagaaggacctgcactttaagtcacggcccagtcacagtggggtgggggtggggggctgcccgcagcacgtggggaacactgagctgttggtcggtcatcatcctgttgctaaaggactcaccagaaactcaatgaagaagaaaaactccatccccatctccaaaatatcaacctcctggcctttatctacatgagacctgctctcacccacaaggatgctgaggctgggcttctcaacctttcgttggggcagcaggttgtgggggctgtcctgtgcacacaggatgctaaccagcttccctgacccgtattcaccaatgccaggagcccctgtcccagctggaaaaaccagaaagtctccagacattgccagtgtcccctgggggccacagttaccccaaatgaatatgactgccctgggcagaatccatcgattctggtcactctcctcattgcttactaaagattgctgcatttctctttctgtcattactcggtggggacatttctgggtcatccctgccattgaatgggaggatgccctgtctggctgtgacgggactgcttctgaagcagaccccgtttgtatccatgagccaggggtaggtgggatcgtatacggctcaagcggcaactgggagtggtaaagccggattctagtgacaatctcggctggacatctgctgagctgagatccaactcacacatcagataatcagctgccacatgcttagttctgggtcatgttagaagtcaccgaactttgctgtttcttagtccatcaataggtggggatgctgcttctcatgaacaagtcagcagatacagacaaaggccaaaagtatttcaactacattccacctggaaatgctgaaaacaaaaccgcacagtgctctgcactgggtcaaagcagttttggtaacaagtggacccattctaaataacaagctcgttgcacagaaatgccaattcgtccatcttggaaggaaatccaaacaaccgtgtctacctgcagataattgaacttgttgtcaccgctcccttgaccggctgaaacgtgcttctgaagtggctctggtcacaggagccttctggaccacgagccacatctctctaaaaagtcccgggccgttcatggggctgcaccttcccgtgctcggttaatttatgcatcttccagactacacattattacccactgtagtctcagaagggacaagggaaatccctgccatgtctgctggccaactttgtccagggaacttcagggtttgtgaaagagaaacaggaagaccgggctctttcttctaccatcggccagagccacagtgcctggcttctctccccgagagctgttgctgaaattccacagagtttgacctcaacaagatctttgaggactgacggactgagtttaagctgtgtaacaaagctgaattcagacagtgtccatataagagctggatatgggaatattaggagaaaacacaccatcgcctcgtcactgggggatttacttgcagaggcacaaaatgggggctgatccgcaggctgtttctggaagggcaccgcggctgctgggctgaccaaaccgtaggcttgtttctttgagctcactgggaagcagtgattgtttctgggattgctgtctgtcacctggtaaataatctaaagaaatcctgtgagcaatgactcaggcagaaaaaaattccaaggagcctatgtaggcttacgaagcacatgtgaaatacgtttcaaagtacaagtgaaattctcttgtctaaggcagaatacaggtctgctcttcaccactggaacatctggacacaggaacggcacctgggtatgcagatggtaggcgcccatctaagtgctcctttaaaaaactctcccaatgggatggaggagcaggacaaaccaatctcaacaatccaaatcctagaaacgcatgaagcctacgcgccccaggctgcagaggcaaccacttcataacaaaacttggttttctcctgcccttcacaccacgggtggacattctaccatgacagtaaccctcgctgcagtctccacccaattacagttccaggaactgtaaatcatgatctatttccttccattcacccttcctggatgtgttcaagactctgggcagactaaacacagagatggtatcagagcaaatcacaaattgattatttctccatatttaaactttctttttttgtttgagaaattcaagataaatttgtcaataatccataaattcttgacccaaacaaaatcaagggacctgagattttttttcggctggcgtcttctatgacagcaaagcgttttcccagtgcaagaaacacggtagacgttcccagtgaatatgcttgaggatcccaggccatgcttgaggatctacccttttgaaatacctgttttcacaaaatgtcagtggagctctgggcaaatgaggatggaactgggtcatctcaacattgtcattattttgaacaatctcttcagagtgtaggagaatcacagttgatgaaaattactctttttacacgacttgctggctgggcagatgttctttgaagggcaagcgtagcaccgtgtgctacagacgtgtctgggaataagccgggagggtcctggtcatgatggcaacacaggctgggacctcgctctgcgacagcctggggtttggctccactggaaaggggcagagtttcaagtgtctcttgctgtcttttggagaggatgtacaatgtatctttttttaacataaatttcattctgattttagcaggaagctttacctttaatccacattttactaaccaaaaatctctagaaactggtattctggattcccagatcaaatatttaagcagcaacaattacgaaagctaaagttactatgtagagattgccaaattgggttacaaagaattgtttctctatactgttcttgacggttgggagtaaaaccattagctctctgccaaagtttgttgtaagtaatacaagcttatttatttctttgagtattttcttcctcccttttttctttccttcctttccttgccaaattctatacctgtcccccaactctgttttctcaaaatactgggggcccaaaacttttgctcttggtgtatgtcatacaccaagctacgaaaggtgctcagtccctgcgtggtacatatgactgaaaatattcatgatttgcaaaactaccttttaatgggtgacctcatatcaaagcaaactgaactccatcatatcagagcttggaaaatggcaaatggagagaatgttcactcaggctcaggtgtccctgctggagtcactgcacagctgagcacgtgagcacatatgctgtgctcctatgctccgtgctcccatgtgctgtacatgctcccacacgctgcactcacacagggccctgctatgctcctatgctccgtgctcccacataccacacgtgctcccacgcgctgcactcacacagggccctgctcactcagcaggcctgccttaccttcacggcatactcggtgtctgtggctttatgcacacatcgcttgcacactgagtaggagcccaccccgatgtcctccttgatctcgtagccatcggtgaagtggatgttgttcccgtgtaactgctgcagagggaccaagagaagaagagttgtcggaaccctcacacgaggggacggtgcagctacacgcacacagaatgtggggcgaagagaggcaccgactgtgaactgagtgtgtggaggcctgggagctcatgggtccccctgcccaaggctgcagagctacttagtgatgttcttgacctaaatgccagcttctctgattccttgggctatgactcttaactttgagacaccaggccgttctgtgtccactggctggtatgtttctcgcaaagatctgagagcaggagaatgtgaaagtgaaaaggaagtgctggcagctgctgggtgcgtggctccaatgcctgtgtgcagagcaagactctggatggaaacatctcatcggaaatctgactccatggtgtccaagtcacagcctgctctgacctgcatgcagcagccccacccacccgctcttaactaagacagaaagccaccatggcagcctgcactgtcatgacaacgtctactttacacacctgtatttctccaaaggccagggaaggaaataggatggaaatccaatgccattcaacttacccggatttcattcttaaataagtttaatcataattagaattaagtttaaccccttagaattctctgtattctggttacatttattaggtgggaaactcattatgaaaataccaccttccaaagacctcccaaagattccatttcatcatgggaaaatgatgcccacaaattaaactgctaccctagggtcctggctgggctccacacagtgaagatgctccagtctctggccatagacaccatggtgacattcttcccagggctttaccttccctctttaagacgaatgccaagtagggtaggagcaagggctcagaacaccatggaataccaccacggagaccattacagggaccaccatgggagccaccacggggaccaccatgggaaccaccacagggaccaccacgggacaaccacgaggaccaccatgggaaccaccacgcggaccaccatgggacaaccacgaggaccaccatgggaaccaccatgacagactaccacagggaccaccacaggaaccactacagggaccaccatggagaccaccacagggaccgccatgggaaccaccatggatgtcacctaagggaccaccacaggagccaccatgggaaccaccacagggaccaccgtaggagaccatcatgggtaccaccggggaaccaccatggggaccaacatggagaccaacacagggaccaccatgggaaccaccacagggaccaccagggagaccaccatggggaccaccacaacagggatcaccatgggaggctaccctagggaccaccacaggaaccaccacgggaaccaccacagggaccaccataggagaccatcacgggtaccaccagggaaccaccacggggaccaccatagggaccaccagggggaccaccacagggaccaccatgggaggccaccctaggcaccagcatggggaccacgacagggaccaccacaggagatcaccacagggaccaccacagggaccaccatggggaccaccacaggaaccaccatgaggaccaccatggctaccaccccagggaccaccctgggagaccaccatggggaccaccagagggaccaccccagggaacaccatggggaccaccacaggggaccacccaagggaccaccatgaggaccaacacaggaggccaccatggggaatatccatgggagaccaccacagggaccaccccagggaccaccctgggagaccaccatggggaccaccacagggaccaccacagggaccaccacaagggaccaccccagggaacaccatggggaccaccacaggacaccaccatggggaccaccacagggaccaccacaggaggccaccatgggagtatccatggggaccgtcacagggaccaccactggagaccaccatgggggcccacaatgtgagaccatcacaggaaccacatgaaggagcaccacgtgagatcatcatggggaccgccatgggggataaccacgagggaccaccatggcagacactcagaacaatgggaagtgtgagggaagaattggtgattaaagtccacccatcctaagcacccaacccccgggtgactgaggccacagggaacaccagagtcacccatcatccaagtgccctcttacccccaacccactgcaggcaaacacagttacctgcacgattgggtgaactgggactttgtgcagatcttgctgtgagggctcctggatcaggcttgaggccacaaagctgaatcctctaaacaggtgatgagcgtttgcactcggggggacgccaggagagtctgtaggtgacaggggcagagttcagatgccacgaaagctgggtgaccctggggtgaagtgatagtgtgtgtgtgcatgtggtatgtgtgtgcaagtccgtgtgtgtgtgtgtgtgtgtgtgtgtgcacgtggcgtatgcctgtggtggaggaaaaggtaaaacagacatgtagaaatgctgaaccagatgaaactacattcttttggcttgtgctaatggtttgatttttaaatggcaaaaatacccagaacaaaaacttcaggattatcattgatggcatctgttagtttgccaacttctgaatttactctatattcttgaccacactcctccacccctacccactccagactcagttaagaaggcaccaatgacctcaggatggaattgtcagtgaacatgaatcctgtatccttagcttctggtctctaggttcgacaggtcccacccctgtgcccacagctgcataactgcatgtgtgctgtgcacgtgctctgctctccaaggacatttgggcaacgtttctcctgtccacagcaaggcatagtacgaaaggagtaattcccttccattaagatttttctgatctctgtaagatctgtgttcaaaagcatgactgctgtgagattgatcccatttcaagtttatcattaagaaaaacaaaaggataaatccctcgtggggaaaaaaaatctgcatcatacataacagatgagaggttaaactctctattgcccgaaagctcccagagatcaatgagaaaagagcaaaatactcaaaggaaggaattctgatagctaccataggcatgaaaagatgcccaatctctctaaggagtaagcatacacatatttaaataggacaacacttttgtctaatgaactaacaaaaatgaaagaaatcaatcacatctgggtttggctgggggtggacacttataattgtaggagggagcataactggcataatcttctggaaagtcaactggcaacatttaaagccaactttaaaatttcaaaattaaaaattttgaaagtaattctacagaattactttcaaaagtgcacagtaataacaaattgtagatgacgcaaacaaatggaaaaacatcacatgctcatgaatcagaagaattaatatcatcaaaatgaacatatcacccaaagcaatctacagattcaatgcaatctctatcaaaaaaccaacgtcatttttcacagaattagaaaaaacaatcctaaagttaacatggaaccaacaaagagcctgaatagccaaagcaattttaagcaaaaggaacaaagctagaactagaagcatcacattacctgacttcaattatatcacaaggagatagtaactaaaatagcatggtactggtataaacatagacacacagattaacggaacagaatagaaaacccagaaataaagccacatgcaaagtcaacaaaaactttgtggggaaaagacactcttttcaataaatgataccgggaaaattagttcgtcataagcaaaagaatgaaactggacccctatgtctcaccatatacaaaaatcaactaagagattaaagacttaagtgatgaaagacctgaaacaatgaaaatactagaataaatcctagagaaaactctttaggacatgggtctagcgaaagacttcgaaagtcttttaagggctgggtgcagtggctcacacctgtaatcccagcactttgggaggctgaggcaggtggatcactaggtcaggagttcgagaccagtctggccaacatagtgaaaccctgtctctactaaaaatacaaaaaaaattagccaggtgtggtggtgtacgcctgtaatcccagctgcttgggaggctgaggcaggagaattgcatgaacccgggaggcggaggttgcagtgagccaagatggcgtcactgcactccagcctgggcgacagagtgagactccatcacacacacacacacacacacacacacacacacaaaaaggctttaagaccagcataagaaatcatcaacagaatgaacagacaacctgcagaatgggagaacatatttgcaaactatgcaactgacaggggagtaatatctagaatttacaaggaactcgaacaactcaacaacaacaacaaaacaaataaccccattaaaaattgaccagaggacataagtagacatttttcaaaagaagacatacagatggccaaacagcatataaaaaatgctcaagatcgctaatcatcagataaatacaaatgaaaaccacaatgagatatcaccttacatcagtcagaatggctattactaaaaagtcaaaaaaataacagatgttggtgaggatgtggagaaaggtggtgggaatgtaaattagtacaacctccatgaaaaacagtacggaaatttctcaaagaactaaatggaactatattcgatgcagcaatcccactgctgggcattgcccaaaggaaaagaaatcgttgtctcaaaaagatacccgcacttggaagcttactgcagcactattcacaattgcaaagtcatggaatcaacctaagtgtccatcaacaggtgattgggtaaacaaaatgtggtacatatacgcaatggaatactatttagtcataaaaaagaatgaaatcatgtcttttgcagcaacatggatggaaaagaaggccattattttaagtgaaacaactcacacgtggaaagtcaaacatcgcatgttctcactcataagtgggtgctaaattgctaaataatgtctgcatgtggatgtcgagtgtggtgggatagagaatggagacgtggaagggtgggagaaggtgagggatgagaaattacttaatgggtaaaatgaacactcctcaggtgatggttacactaaaagaccagccctcaccactatgtactctacccatgaacaaaactacatctgtacctctgaaatttacagaaataaaaaataaaacaggctgggcgcggtggatcacacctgtaatctcagcactttgggaggctgaggtgggcagatcacgaggtcaggagttcacgaccagcctaaccaacatggtgaagccctgtctctattaaaaatacaaaaattagccaggcggggtggcgcacgcctgtaatcccagctactcaggaggctgaggcaggagaatcgcttgaacctgggaggtggaggttgcagtgagccaagatcgcaccactgcactctagcctgggtgacagagcgagactctgtctcaaacaaaacaaaacaaaaaaacaagcaaacgaaaaaatcccaaagtacttagacataaatgtagaaaaagtctgtttcagtgatatgtgttacagaaaagaaaaaggagacactaaatactcctcactaagacaatcatggtcatggtcaacagtggcccatctgtatcaggatgctttgtaatgattgcagtgtgagtcctgccagcgagaccagggccatcagaaggagccacagttgcatggactgacagagacgtggcttcctaatcgtttgtcaaatcaaaaaagcaaaaagctgttgaacaatatgaagaacccagacattacttaaaaaattaaatatattttaatatatttaaaaacagaataggataatagattaatatattaaaatagaatatatattacactaaaatagaatactataatacattatataatatgtaaatttataatatatgaaaatataatacgtaatttttcctgaaaacacacatatgtacaaatttaaacattcttatttatatatcttttaagactccctgtatgtatagttgtgtgcatatttgtatattcgagaattctctacccgcaggcctttgtctctcagcacttcttccccccctcgtctgtttaggtgctgtactttgaaaggaagaaagtgcacctagttctcagttttatctccacacggtgcggcaggtgtgtgggggtgggaggcagctgcagagaacacgtgttttgtttcttagcatcatattttggggacaacggttatgagggcagccgctccgaagcccaggagccgggccccacgccgcgtgggcctctggtgcaagcgggggccaggccgtgggcagatggacgacgcagcgtcccactggtgctcttcctggggtaggaagcgtcatggacccgggctcatcttcagtgtcctgaaccaagaggcagctagagccaggtgtcggccctcaaaggggccaaaaaaggggccttcacagtcaccccaggtagatgcccacgcgacccctggactaatgtgaccagagtcggctgtgtttggaaataaacttccaacgctccagactagcgaagcgtcgttaaaaaaccgaaggtaccctgagtggtttttagaaactgaaattctgcagcgcgacccggcagagaagctcggggctttctgagcggctctgcttcgcggcacacggagccgctcgaggaggaggcgctcctgctacacccggtttgctctctgcacaaagtctggctttgaggtctgcctcctcccaaagatcccctgagctaccacgggccgcagattctcccccggaaaaatgaaacacacatggctacatcatggtttaagaaatcttcaaacctggaggcactttgatgtcttcccttagggatttagactcagagcttgagcttattctggggaatccgcagagccacacgagtgtgaagtgctgagcaaggattgggagtccaatttacagcctgtggaggagtgtgtgcgggggtgggggcacaggccatgttaacttgacagacacagtttcattggtgaatggaaaatctgtaattccaataagcaatgtcttctaaccaaccaagaggcacggaagacacagccacaaccttccgtggccagagaacccatgcctctcctcacacagaccaaggagagcctgcggaaagggtaaaagtaacagcaatttaccgaaggccaagtggatcttcaccaaaagttaagaggctgacatttggtcggtgtggctagctagtaaggaaatgacaggtggcctaaatagaatttaaagcactttataatcacctgagggatgccgattttcagcacagtatttaagaagagcaaaattgtgagtcagataaaaggagatgtagaactacagtaattacaaacaacctctcatggtcctgtgggtatttcctgatttgtggagtctgcctgatcggtttaaaatcttagattggcatctcgggctaagcagcatgctctagggggcagccaaggtgtgatcagggaatagaaaccagcttgagcgctggctgaagtttcagaaaagactgaaagcctaactgtaagaaattcccactgtgagtccaggatctaacatagaggatttgtagcttatccattgcttcagagtcacatttctacagctgctcattcacccagccatgtgctcagctcacatgcttagaaaatcctactctcctgtacaaatcagaatgagtttaatgtgtctttagcacttcaattactacctacctcaaaggcaaacagtggtgtgataaattaactgaaactgattggagaactggaaacactaaggaataaaaaaggcaattctgaatagcactggagtgcattgtgtctaattatgttttccttaggctattattaaaatacaatggaattctctagaagctcaaaaaaagcttccggttccactggccaactaggttggggtttaaattcttcacagataagataaaaggcatgtccatatgaatattagagttgactgtattaacattttcttaccaagcagcacaaacatagactttctttccacattttaaacacacagccccacatgttggcacctcacgaggatgtgtgcacgttctgttagggaccttatggtccttgtggacttagggacaacgatctcgtggtcagacctaattgcctctgagctccttttacattcaggccaacaataggtggagaaatatcatgacttgcttgggtgacctgtgggcaggggcaggagggaatccccaaatcctgccccatcttttcaaactcagaaactgaaaagtaatcctgttctgtgaattgggttaagtttgtcaatgggaaggaccaaccccaacacacaaatactttctaaggaagctgagaatggggtgaggtgaaaatcccacagtcacttaccggagagagcagacccagaagtgttctccaaggcagcctcattacatcatgaatcagtgatgaaccaaagctataatgatagttttaattctacctggggactgcaggatgacccaaaagaagtaactgagcagccggtggcatgactccctggtttacagtgcccggaatcagctttcttcctgttcttggtaccaatgtggcctgggtcaggagctggcctaggcccatcaaaagtcccgctaaaagccccgcaaccctccctatctgcacacgctcacaccctcctcaatgtgttcatctgggtatatgggaaacagggatttcaccaacagctgaatctggaggaacaaagtggattctctaacttcatctacctgacattttgtggttgaccatatatttgtttcccgattatcttttaaaaaataagaaaatttcagattcaaaagcagcgagaaaaaatacagtgaatccccgtagatccaagatgcagcctggccaaccaccagctccctggacttgtcccacttatgtctacagaaggagcttgtggatggttttgtacataaccagcatactgttagtgttgtggactgaattatgtccttcccaaattcaaatgttaaggccctacccccaagtgtaactgtatttggagacagggccttgatatggttcagctttgtgtccccacccaaatctcaggctctgtgtccctacccaaatctcatcttggagccctcataattcccatgtgttgtaggagggacctggtgggagatgactgaattatgggggtgggtctttcctgtgctgttctcatgatggtcaatgagtctcatgagatctgagagttttaaaaaggggagtttccctgcacaagctctctctttgttgccatccacgtaagatggggcttgcttctacttgccttctgccacgattgtgaggcttcctcagccatgtggaactgtaaattcactaaacttctttcttttgaaaaattgcccagtctcaggtatgtctttatcagcagtgtgaaaacagactaatacaggcctttaagagaataactgaagttaagtgaggataaaagtgtggggccctaatccaagaggactagtgtccttataagaagacagagagacaccagagctccatcttgctgtctttgcacacacagaagaaaggccacgtggggacacagcaagaacacagctgtctgcaagtcaaggcgagagctctcaccaggaaccaaccctgtcagtaccttgaacttggacttccagcctccagactgtgagaaaataaatgactgttgtttaaaccacacagtctgtagtattttgttatgatagccctatcagaccaggataattaccatatataaaaaagcagactttaattcattaatatcccaaaaagataacttttaaagggagctgaccagttctgatgaaatttgctagaccccaagagtaatttcagacacaccaggagaccaaatctatgcatccaattgctgtgctatttagtagccgatactacttttcaaatgggtttctgttttttgcatgaataatatctatagctcataaatctatagacataactgacagccttccctctccgtaaatgcactttaattgaaagagggattttaattgcctccagtttcttttcttgctcttgctgtgtgtctctctgacacaggaagtaactggaccggtgtcttggaataaggataccttcatcatttccaaggtggaggttatatagggaacaacagagaactggggctatcacttaaacctttatcactgagcagagaaaacaacaacaaaaaacccaaacagaatggacagttattttccatgaaaagaattctgaggcatgggaatttcttgttcctagatatctgtctctaaggggtcaggtgggagaagccaccgatagagggaaccactgtggcacacacctgtgggcgtccgcgctgtgaactcggggtcaaagtggaaggtgtcctcaggcctgcccactgctggtttgaacggtggcttgatctccttccggtacagcgtctattaatacaaggaaagcaagacagggcactgaggatgcacagacattgccacagaacactggggacagagaaacctgctgtggggagggaaggatgttcttatcacagactgcattggccttgtggattacaagggatttctaaatactctgaaatatagatggcataaaatatattatgtgtagtatgatagatactatggcatatataataacgatgtattatagaaaggtatagaaaaggcatagtttgaggtatgagggtttggggacatgccaagtgttcttcattttagggcaatagttttctagcttcttcttggtagtagaatcttcttttccaagtaaaatcatacaggacagccaccacttgcccccactggggacagcagtgaagaggccgtgtggctctctcctccctgccctgggactttggggccagcaccacggaacttcagctctgcggggcactgcaaaaaccgccgacccagagccaccccagggtgctctcttgccagtgtctcagggcctgtgctctggggccttggcacctctgccagaaacctgccttgggtgtcagaatgagggcgcccaggctcctcgacaggaggacgcctgcatctgcagagaaccggcccttcccatgccccctctgggcccaaacttatttccccaacaggaccttggacagaaggcacagaaagtccacagccctctgtgctccggtctcagagctgcctgcctgacaatgctttccaaagctgagatgtgttgttttcaatcctctagggcaacaaggcattctgttgggaattcaatgtaaagaaagcacacacaggtacctggaacctggcgtagtcctcaggcgggtgatgctgcaggtggtgcttagatggagggagccgggggagcccagtgctgagagaagtgtggagggggaggggcactggagggaggactggggcctgaggcctgactggaaggccgagggacctccgggcagattcagtagaggatgctgggtttagtcaaatcaccctgacgacagaaggcacgggccatgccagtgtgctgaggggccagcctggtagttagcagggcagcagcagggcagggccaggctggggtcttgccccccactgagcatggggtttccttaatcctgcctagggagggtccccacggtgttcgcagaaaacatccagcctggagtcctgtcctgggcacttgtgtgtgaccatctagagctcagttctggactcagggaccctcatggccgtgcagctctggaaaatggacacagtgactccagctaaaacctgttctacatctctggaaagcaaatttcaacacctcctccgatgaggcccgacgggaagggagaggagggaggagggcgtctgacatctgggtcccacctggggcacaccctgctctgcttatccgggagcacctgggtcagagcccaggccagaaaccagggcccacagctactgcaggagggcgaggtgccaacagacgcccccgagctcccccgggggcttatcaggcagcaggatgtgccctgatgtgcaagagctcagggcgtgcacgcgggaaccatcggaggagaaacaggattgaattcagccctgaattatttgctcatttcctgccttgggggcatagatttcattagcaccgagttactcttcaagccattttcagaaatgaaaagacgctgctttctgcagtgaggcacaggacaggtgggaataatctccccagacacatgtgcttgcctgaggaagtctcctgagctgggaagcccaggccatcgggtgccacgaacaggccagtgcagcccattccccacccagagagtcctgagagccgggctattaagaatcctgctgaagtcaaaatcacatcctccctctgtgtgagagcaagcgagggagagaggtggagagagagagagagagagatggggagagatggggagagagggggtggggggagaaagagacggaggggaggaggggagaaatgggggagggggaggggaagggggtaagaaagagagagagcacgcactagctcgatccagcacagagccaggcctcctacttttattatgaggaggaatttatttacacaagagatttccattaaaaacaaaataaaatacaaaactggttgtcacgtattcattccagtgtgaagtgtttacctccggaaagcaggggcccacatggcccctctagctcctctcctccgtgccagctcttcctccatcatcctggggacccatcttgcccacccctgcccctgccccaccacagcctctgataaaaccatccccagagcctggtgcccagtgcttcttcatagaggggttttgcccccactgggacatttggcagtgcccaaagacactgctggctgccacacctgtgtgaccgctgcaggctcccaaggggtggaggccagggtgtgcagaacccagccacccataacagccccaccacacagcatcgcgcaggtgccacccagggtgaaggtgggagaccctggccctgcctgcttccttctctacctcacccttcctgccttgtttctgctccaaccctcaaaagtgcaacgtcaaccagcttcttcaagaaggaggactggatgttgaggcgactggccactgtccttggaaccccttcccctccccatggaacccccggtggggcagggctgcaggctctgcctggcttcctacaggccacatccttctccctcctcgtccaccgatggggcaggcaccacagcctcgcttcacagctgtccaggaaagcacaggctctatctgtgaccaccctgcctctggaggctcacatccagaggctgtcaccttcctgccttctaagtcagattcacagcccagcactggtactgctgtgacctcctctgggctgaggccatcccactcctttaatactaagtatctgctgctaagtcaggtcccggttccctccagcccaggacactgcgcctgggggctgggctcagacttcccctgtgctctgccccatctgtgcctagcccggtgctgcgagtcacctgggatgcccagtgaggaggtcctaagcccaggtagtcccgtagcacttttgtaccacacaaatagctccccctcacacggcagcaggaggaagcccgcctctgctttccccgtgctttccacccctcggctgtgagcccaggctttcagctcacagaccccaacaagaccagagggaggcatgcgtgtgagagtggacggagcgcttgctgagggccagggccttccttctgtgccgcgggagccttcaggcaactggccaccccgtaacatgggtccgtgtgccaaccgcagctatgaacacagcctgttcactggggcctgcagaccaccatgccccacctgctggaggctgctgcgttctcactctggtctgggccaggcagtgaggttctgtgcgggccgccggtggccaactggagccggtcactctggccctttggacggcttcctcgaggcttgctgcaatcttaaaggccggtcaatgtcttcctgatgctgcgtaaacatttggaaggtgctaatatgtgttattactgtgtatgctttttctttccatgtgcaaacctaagaacgggtttgaggctttgggggagaagtcatccggcctcttgctttgtatgtaaaccactgtaggcagggttgtgttgagagtgaaacagcagcagcatctcacctgggattctgagcttaacgagacagacactggcaattctgccctggatcccccctttctgagactctgggacaattcatgccgaaaccgacgagagaaaatgcagtctcatgatcaaattcgccaggcacatttaaaatcatctcatttgtcccaggatgtcagaatgacacagtgtggccgcagggctgaaacgaatttcacgggaaacaagcgcacgtgaggaagcccggagcaggcccatcaggattctatttatactaaagaccttcagctaagtgagaagaggaccgagacagcaacagaaaaacgggaactgggtgatgacataggaaacagatgctagtttggggtctcagaccctaacatctgccttctgtagacggttttggcttcaggcattttggaattaatacgctccaataaggcaaagggcacatttatagattattcctaaaataataatgcaaaaatatgcagaccagagagaagacaggatcgaaagcgccgcaggaagaatctaaacgattttcaaagcgtcacgatgggtgtgacaggtcagtggctcatggagcgggactgtgcctgcagtttacccggctgtaggtgggtccaacagaagaagcacctgaagggtgatgattcattgcacagagtccttgctgggttccctgaagggggagtgctcctagtgtatataatgtaggaataaaaggatagaaatctcgctgctggcaatgggagcaacagctgcatggagacgcctgtgctgtgaggccctgacccgcagcctacagctcccacacccccaaaccactctctgcgccatactgcaaatactccacttgtgggcaagaagaccaaagtggcctgaagacccggaacccaccctctgctcctgccaggacacacaacagccaagttcagggcacaccccacgcgctgccagatcaccgagcgacctcaagcttctcattgtcctgtgcctcagtctcctctacaagtttctcccatctcacagcatcacagctaatggtgtgcttggaagggtttcaaactgtacaaagaacataaacatgagctactagtattgatcatgaataacgaataacagtaataataagagtcagtgcaatactaagggtctaggccctggacagagttccagaaacaaagatgtccctccctggtgactgtgtgtctccagcatcatcattcactgcctgtaataatatttgcagttccctgggtccccctgcaagggacgccaggctgggctgggagccgtcctcagactggcttgtgctgtctgcagtgattaacttttacgaagctttttttgggttcgtgctaattctgtgttctcagcatgcttcagccacgggggaaaaaccaacacagcttctatctgctggactctgccgtatcctctgcagaggtttgtagtccgatcattaactcgtggcttctcactcagctcatcaagcagagctggccttcagaaggaatggctcccgtgcagacgttcactcgctcatctctgaagctaaattaaaaggcagcagcccacacctccaccgtccccacacttactgtcagcagatgggtcctgctccagcaggccactgaagaccccggggacagcagtgggatgacaggtgtttacttaaaaaaataaataaataaataaataaataaaaagatctgctggcagtatcggatcacagagagcagcagaaagcaaaataaatatcctaatattttcccagttggatcctgaggcaagccattgggtgaagtacccaggcagaaatctagtggttaggaaatgtcttctcattcgtcattaaggagtgtctgcattgcagagggaacggcttttggtgttaacagttcttgcaaatgaggctgaactgtggttttcagttttctgagctgccgaaaagcagaatgggcacatctggacaaatacatcacggagtaaaattaccccttaaataaatacctttaaacatcttgcattttagcccctgctttctgaagaatgggttgatggcttgcctggatgtgttattggggtttgaggttagccatgaagacacatgggctgctactggggccgcagacacaggagaacacacgggcaaacttgactcatgagagaggatcagctgagatggggggaccactggactcatcctagcaagatgttgacagcttctaagaccatcacggagcgggactgtgcctgcagtttacgcggtgtcctgaacacggtgttttcatgcctacacatctttgctggaagcatccttcttctcctccttctgcccctctgctggttaattccactcgccctctttcaggcatcatttctctctctttctgctggccactttcactgtgcacaaacctcttccatcggtggatgatggcgttatgggacagcagactcctcagtctgtgagcagctggaggacggggctctgcgttccagctgtgacgtcatggacatggacactttgctggtgcaccaccagggtgagcaccaagcgttatttatcaaatgcatgaattaatgcaaaagtggcatttctgagctcttctgccactcacgggctgtgtgggttcagggcgctgggcagaacaagagcctgccattcctctagcactgctgcctgccttcctctgggaagtacagacatgaaggaaacacgcctggttctgatcaatcacaaggacctctctcaaaacgaaaacaaggccaaaataaaatcaaattaagtgctaagagcaacaaaaggaacttctcagctctgattctagtctgattcctttgaaatcacgcagaaatgccaccttcttgggttgtgtttgctttccagccacagggagaccagagcaccctgagcagaggcgctgtgtagagaaggctcttattgccacaggaaaaaggcggcttctgctcagagctcgccggacctcagcattctggaatgcacattaatctaatgtgtcatagttttccaaatccatcgtattgttaaaattccaggcatctcacaaggttgtcttagcaagtgcgtaagcccttctgggccatgcatactttggagtggctccactcttggctgagtgctctgtgttgcactgtgtcacctgggggttcggtgtgaagagacttctctttcctaccagctgcagccctcagggtctcccatcccaggatgctgccctgcccacctgcagctccccctcccagcccagcaatcctggttctccattctcccaggcatggtctctggaggaaggactagagtgtgagagtgaggaaatggagggggcaagtctccctcgacagctgtgactcctgtcttgagagtctcactcattcattcactgattcattcactgacttactgactcattcactcacttattcactgattcactgactcattcacttattcatttgctcgttcactcactccctcattcactcactccctcactcactcattcactaactcactcactgactcccttactcattcactcactcactcattcactcactccctcattcactcattccttcactcactccctcacttgttgactcactcattaactcactcccttactcattcatgcactccctcactcattaactcactcactcctttactcattcattcactcattcattcacttcctcactcattcactcactcattgactcactgactcattcactcactccctcactcattcactctctaactcactccctcattcactcactccctcactcattaactcattcattcactcactcattaactcactcactcactcccttactcattcactcactcactcattcattcactccctcactcattcactccctccttccctcactcatccattcactcactcagtagggattcataaagtgcctcctttgagccaggccctgttttagagctgtgggatacacctctaagccacagattcctgatcttgcagcttacattctagtggcaggagacagaaaataataatatacatcagaaacacatggtattttgaggcgagtcagaaagtgataagggatatgaaaacagagcaaggccgggggctggggtgctgggagaggagctgcagtttggaagagccgcaggacaggtctcataagatgacactgaatggcagactggaaggaggagaccagtgagcccttgggagacttgggcaggaggggccctggaagccagaccagctggagccagtgcttggggggaacctgttccatggaggcatgggaaggaggctccgtgaggatgggaggggtgaggtgtggctgtcctgaccactttcgtgtgcttctccatctgtcccctgctgcatcctccttgtcagcacagtgtcctcctgtgacatgtgcagacccatctgtccaccgcctttctctgccaagtcatcacaagacccacgggtgcaggactttgttccatctacggctctatccccagccctggaaagtgcctgagactgggacgcccagcagaaagggctggataaatggagaagcagatcatacggggagaagctgtgtggtcccaccttaaccactggcaggcaggggaggggatgcaacatgctgtgaccccctgaggggcaggcatctgggttccaggcacagtgctgtgctaaccatccacaggctgacacccaggtccattcttcatgaaacaggcttgcctgagatctaaacgccgtgtaaggtgaagtctccatagaaaatacattccaacgcagagtcgaatgacagtgaccttaggtgcccatctgtgaggtgagcacagcctgagcttctgataagcctaaattttcagggaagctaagtaagagactccaaagggaggccttggttttcatttcttggaggtcctggttgggaggcacagatgtcctgaaactttacactcttttctctaatcttactttcgaaaagaagtctaatcttacgaaagttctttagtcagaactgtaaaactaggttttaaaaagttatcactcttccccagtttgagtgctttgctggggctcaggctgaaggaagaggagagctggctggttttatccagcactggtgttacacattcccagaggagaggtctggggctgcaggtggggcccacctcttaatgaaatgcgtggaggccccggactccatgaggacataaagaagacagaggccgggcgcggtggctcacgcctgtaatcccagcactttgggaggccaaggtgggtggatcatgaggtcaggagatcgagatcatcctggctaacacggtgaaaccctgtctctactaaaaatataaaaaaaattagccgggcgtggtgggggcgcctgtaatcccagctattcgggaggctgaggcaggagaatggcgtgaatctggcaggtggagcttgcagtgagccgagatcgcgccactgcactccagcctgggcgacagagcgagactaaaaaaaaaaaaaaaaagaagacagagaggaaagcgaaagcagataataaactctatactgtagagggcatttaaatcttaaaaagtgttccattaaaatcttttgaggttaatttgttaggtcaggaaaagaaaatcccaacatagctgtttttgtgttaacctaaaggaaagagctgaaagcaactgataggaaaggaggtatcgccttcctcagatggaaggaacagcctccgagttttagccgcgagaactccctgtgtgggggacgcgtcagacgctgactgcttcaccattcggagttggcgtcttggcagaaataggcaattgacacttgtagcttggtgaaaagtgagatacgagaacttctcagacaatgtccagcctggcccagagaactggaaatggaggctttaccaataactccactaacagaagctccagtttattccaacaactcggcactgttgttttttttttttttttttaaatgtgacttccacgtgggcatcagcttgactaacgatggaaaatgcagtatcgaatctgggcctgcccatagccctagcactaaagggtcctggttgagcagcttgtcatgacttttgtctgttcagcccttgaggttagaagacagtcactcctggagcaatcgggaatatgcagggctcggagaggccggggagtgggtgcagggaggacagaagcctcgactctgatgggcagaggagagtagaaggaggaaagctgaggggacttcaggcctcaagctggagggaggggcactcacgtgtctgtgcctcccaagttgccagcccgctcagcagggtcctgggggctccctgcctgcaggtggcttgtctacattcacctccgacctacttgtgacccggacactgaggaccctctgcaccaagccgtatgttccctccacccacttctgtgtcacgcgtgtgcaggtggggactgtggcatgcaacttacgttccagtctatggtcacaaagaagggatggcgcttaatttcctccactccgtcaatgccagcacctgtcaacaacacagaaatgatcatcagaacaaatccaagatggggttctctgacagtttccaatgcagcagtgtggagggtggggatgtgcagaggtggggccgtgggaaggagcccagaggctgctcactcctgcccaaggcacctgcgcacctgccgatgcccccagctcagaaagccacgactcagccccgagggcttgtgaggcagaggtggcctggggttggagtgagcaaaagaggtggtcaagagaagcatgggacaggccagccaggtgctgcctgctgcatgtgacggctgcctagcaccccactgtcacccccaggagcttgaggtgcctgtgagtgtgagcaccaggtggacctcccaggaggccggaggggaaggtgcagagcagagttcctggcaaagctgctgcagttaacccgggagggaaggattccaggaaatgaagaggagttgacaggactgagtcccggaggaagccagagcccagcctcctgcccacacctggccacccctgagcctgctcagacaggtgactgtgtttacctggaggctgcttacaaatatctctgctttgttctgttatttctacctaacctcctcccttactttgttgcgtacaatcctaaggccctggggcagaaaggaaggagggaggagtaggcggagcgctgggggccctttcaggcagcatgattccctaacggtggatacatgtccactcatctgccagaaatcgccactgtccccccagaacgagcccagtgtggacaaggcctttagtcagtagctcagctcaccgactgcagaagcgtgcccattcacggaggcactactgttcgggaaagcggtggggcagggagtgaggggccgtggaatcttgctgcagtttctgttcagtttttctgtaaacttaaaactgttctgaacacaaagtctattaattaaaaacaaaaggccctaaagctctaggactctgtgttttctccaggatgggacggccacagaggagcccatcctcccgggtcacgaatccgagaagaggcgggcttggctggaaggggcagtggcggcggtggctggggaattcctgccagctccgggcccagggctggggagggtctgatccctggggcccggctcccctgttctgcaagctgtgttcctttccgctgccaactcctaacggctgtgctccaaatcagagcctcctgtgccatgtatgccccttcgtggagcccccctcatgtccagctctcactcctggaagagcggggctgcccggggatgctgtggtcagcacaggtgtggcccggcctgtccggctggaagctggcctggagtggcgcaggtcaccgggagtcacagcagatggtgccatcgttggctggaactgcccgtgtcctgacccctcccacccctccattccgcactctgggcagtgatgtggaggaggctcgggggctgtggtggcctcagaaagcgcctctaggtggtcaacggctcagagacagtccccttaccctggaagcttggccagggccatggtgctaggaacgaacccacatactaaatgcccctgaaggcactctcacagcactctcagctttgtgttattcacactttgacgtgaaagtccatctagaaggaattagaggaagggcacacattcaggagtttctccttccatgaggacgcagaatcataggacagacatagcacacggacatctcagtcatccgatgcacaattgctgttcccattttacagacgaggacactgaggctgacacaggttgggtagcttgttcaaaatcagaccagaggttatgagttacaggtactgggtttggaggcacatgtctgaaaagcagctgaggtgccccaccttctgaagtgtctttcccgaggactccctgctgaggcccctccgggtccccagtctagctcccttgttctcctctaaaccctgagcccagggatctgatcccaggcctttgcaatcgcagcagctggcatgagccttcgcaggcgcaccagtggctgctgtaatgaaatttccagagcgacagtctgacttccaaacagccctccccaagcgcccatcctgtgtgcaggcctcctttgatgatgaccagaactctgggttgaagagtccttctggtcacgatgattaacagaaagaccctcctctgaagtgtgcctctcctctactcttttgtttggtgactgttggacgcatggccagaggcactctcaaaaggctggagattggaacaaacagttcagaggccctggtacacgcacaggtgtggcaacttgttggctgtacttctttggaggatctatttcacattttgtacccactgtatttccttcttgttcatcatttgcaaatatggtctgcaggaattttagaaagtgagaggcagaggaaatacaggtattggtataactactatgtaactggtatatgctgggtttacctggatcactgcaatcaacacatttctatctttacctcctttcccctaaggtagtaagattttgcaccatgtttgtattttaagccctcagcaaaaagagtcaacaggggaataacactttggttatcactaaaaaattacaggggttccaattacagggggaaacatgaaacaggaggaggacttttgcactcagcaccttgaaacctgtgtcaaccctcccagggcagtcaggtttattattcttgttaaaataggtgactttgcactcggctccccctttttatctccactgaacccactggacaaatgacggtgagtggagttctgggcggggagaatcggaaggtatcaggctgatgctggaatcacggctggctcgctacgggatgcggatgacacgcactgaaggccttccttggttctagaggactgctgccactcatctagatcatgaagcactgacaagaacagggacagaaactgtgagcacagaaggccggaattccctcctgtcaggcttagcaatttgtcgttaagttccttaatgcagggcaaataggagttcaaggttcaggggaacagaagattcaagaatcacacttcttctcggtagtaataacacctgatcctgtttgtttaaatggcttgtggtctatctccaaattggggcgtcacctaatgtgtttatctgggtctgtgtctccaattgctgttctctggttaagggtataattttgcaaccagttggaactctcatatcaatgactaaagtgcagtgcagtgcctgtgaatggatttttttttttattttggggggattcattctgtcgcccaggctggtatgcagtggcatgatcgtgactcactgcagcctcgatttcctgggctcaggtgatcctcccagctcagtctcctgagtagctgggactacaggcatgtgccactacacctggctaatattttgtattttttgtagagatggggtctcaccatgttgcccaggctggtgtcaaactcttgggctcaagtgatctgcctgcctgggtctcccaaagtgctgggattataggcaggagccactgcacggatgatttattctttcattgcaccgattctgtccagctcttctactccatatttttcacgaggtaagccattcatttcattgtggggattctaaattctcagcaggtgattcccaaagggttttggtatctgccaaaaatgtgtgcattgtgtctgtatatccacagatagctttaggagatggttaattcatggtttgggactcctttgcaatattttcatttttgttgtttgagagtcacacaaacccatctccgacacttctgggaacattcagtagaatcttactggctgcctccttaggtttcttacatactgcaagcttctcctaaccagcccaccatgtccagcctataaccatccagggcaacttccatcattgacttaaatactaggtctgctttttcaatttcttcatcacttaaaggttatctacacattatttgtttaaaggtttttttttttttttttttggccaatttgaaatttcatctatttcatgtttacaccctttgtcagggagtcgctcgtgtcccacaggactcagccggttaggagtcagggatgggctaggggctcaggcttgagcggtgtgggagtcagatctgcagacaggccctgggcatgggtctctagcggctccctagggctggttgtgagggtggggctgcctggtcttcagcaaccatcaaagcctggcttatgacaggcagtcccagcaatgccagtagaaactgggatgaggatcagaatggaccacgtttgaagtcattaaaaacacatcatctggagatcagttctggacaggaaaacagtaacaagagcaacggaaaacctctgcccgtgcgtcagccacaggcagcaggtgtgctgtgaagacagcacgcctggcttaggtgatgggcgttgatttgctgtgctatttttgtgctcatcagcacatcgaattcctttctaacctttccctcactttaaacttccccctgggagtctcagaatatctcatgagtttctaggagaagctacagatgctcattaggaatgagctagaaagctgtcagctttggaaaaaaggaagatttggaggtaggcttaggaagttttatactcactgcaaactcctgtcctgggggggaagtcgggagataacaaataacaaacactggtgctgaaaaccccagcagttcctgatctcagtgcaggatacatttacagctgtttctagacatcactatggtataaacttccatcagaaatggaactcacttaagtaatgagaagcagccaacaccacacccagggtctagccctacaaagcctgttcagcagaagcatcacccacaaccgcgagcctctcccatctcagccgggagcagcgccaagcacagagggaccaaatgtcctgctgagcctgttcctgcagagcttcatcccggagcctacccgtgatgctgccttggtccgtgcttacagggtgcagtgccgagggcgctggccaggagcccctttctcacctttcttttattctattctttgaagtccctggatttgcaaatcactcagagtcaccgagtcctccacctgggaggcgttttcctcgcacagacaagaaagcagacagcctgagcaggggtgtgaccctccaaggcctctatcgtgggatgtgccccagcctgtggtgcttctgcttagactgggtcaccccatgctgctacagccaccccagggtctttctctaattcacaaccacacaaccaccagaacaacagtgcgaagaaacaagactggtgtcccctcggctgcacccttgagagcccccacgctcaccacacccactgcgtactcccgagcgtggcccggcccctggctgctctgtctcctctccactcacccgtcacccaggcatggggacattgcagagtcacacgtgcccccaggtgtgccattcttccttccttcctcccactactctgcacgtgacgtttcttgggcccagaaggcccctccccccacaccccgtccagcatctgggacatcttctgagacccaacccaggcgtcctcacagagcagctctgtcgcccccactcaaatagatcagtggccccaaaccagtggcctctggaggtcagtggcagtgccatccaccttcctaagccagcacctgctacgggcattcagtacacattcactgaacagatcacacacgaaggcagggggattcagtctagaactcttttgaacgaagacattttatcttcaggggatgtggaggtgggagaaatgccagtcttagactcagaagcctaggagcctggagcaactcacacgggggcagagggccgttttctcacctgcagagtgtaagagaggaatgagatgcgtctgtatttctggtagtctggacatgtataaacacattatgccatctcttccagctgtcaatatctgtgcagaaactctgggaggggtcaactcccccaaatttgtatgctgaagccctaatccccaatatccccaatgtctcacaatgtgaccacatgtgcaaaaggggtcactgcaggtataatgagtccggcatcagcagggcaggcactcatctcctatgactgctgtccctagaacaaggggaaatttggacacagacccacacggaggagaaggccacatggagatggaggcggaggtcagggtgtggcattcacagccaggggtgtcaaggctggccagcaaagccccggggtctaggagcggccagggacacattcctttcagtgggagcacagccctgcagccttgagcttggacctctggcctccagagctgcgggaggacacatttctgctgttcaagctgcccagtttgcagttctttgtcaaggctgccccaagaaactcacacagaggggcggccaacgaacagctcagtgttcactgtggtccgctgggcattagagacgtgtgtttttatccgtgtttctcgctacactgtgcgcacacagagggcacatttttcctttgatttcctaatttctagcttattgttttgtccactgatccctctgtcaactggactgaacggaactgtctggaaatccagaggcttcccgctggtgggggctcattaaggaagaggcaggggtgaggaggtcgagaggcagagagggtcccctctctccctgggggaggccatagagagggagagtctacagctcgaggggactcacactaggggagacaccaagagaggacaggtgggaggcaatgaagacgcatttgctcctcctcccagcccctcaattgggccctgaggtcctgtgtggcgagtccagggcgggagagctctggcattgagagctcttatcagacaggctcaacacaggggcagctggaggtgtgcgattgccttgcatatccatgcgagggcccagggttagaacgaggcctctaacagccaccaattccccagatggtcaaagggagaactcaattccaggctcttttggaggaacgagaataaggctcacggcagtcagaagcagaggtaagttccagccacaaaaccggccgcctgtgcaggtgaaggtgactctgcccagcggggttttcagactacctggctccagctccgcaggcaactaaatccagcgccctccctggataaaggctgggcaattaattctgactgtagcttcttcatgttgagcctgggcatcttaggttgtaaaatacacctgtgggagggtccacagctcctcgaaagcttgatgataactcacttagacacggtttgaagggcgatcttggcccgaggtgagccattctccatgcttgtgtgagcttccagggggctggtatcttttaaccaatactcatctctacacctagggaggaggtagctccatctttctctcatccataatttaaaccaaatactaaaacaatattttaaagaactatgattttagtaatgttaaatttgaagggttttaatttaaaaaataggttatttagaaaattatttgcttctcccagaacaaggggagaaaaagtacaaacaccccaatactttgtcacattcacccaatttactgtagcaaatcctctcccagcaatataataatgtttgaaagaaaatagtgactctggccaggcacagtggctcacgcctgtaatctcatgttgggaggccaatgcaggaggactgctttagtccaggagttcgagaccagcctgggcaacatagcggggccccttctctacaaaacagtaataaactagtcaggtgtggttgtgcatgcctgtagtcccagctactcaggaggctgacgtgggaggactgcctgagtccaggcaactgagactgaagtgagtcatgattgcaccactgtgatcagcctgggcaacagagcaagaccctgtttaaaaaaggaaaggagaggaaacagtgactccaagacaaagcgcttcgattgctgcaagaatagatctgaattgttggctctcatgtacgtttggatgaataaatacgtccagcatctccacttctcctttctgactccaattcgcatttccagggggaggccaagcaggggaggggtgcacagcaaaccctcacgcatgtggccccacaggtggtgactgcggcagctcggctgggcgggggcggttaccatgcgtcacctcagagggagtggcagaggtggggtcgcggtgcctgccacctgaggcggcacgtcccttgcacatatgctcacgtgcttatgttataataagtgtccagatgtcatttgggtgcttgggaatgacaaggcagagactacacagatttccatcataaaagcttggtcttgaaagaggagtttcagccaccggcaaggttcctggcagcaactgtgtgaagatgttaccctctgagggatcagaccccgggcaaggcgggcatgactctgtgctcttgccagggtggatttcccgggtgagcttcgggactctggcattggcctcaatgttcttctggctggtactgcaggctttccatttacccttccattctgcaaccagctcagtggagggtttaacaacatctattaaaatgcatctcacaaaacgatggttttctccagaaaacgctcagaattgtggctcctcggctattgtgcaccagataacgttcctctgttctgtcccacagccaagtggcagagaaagaaaagtgtcagatgagcaggaagcaatgaggccggggggttggacacccttcccggccacaggcctctgcacaccggtgctctctgcttgtttatgtgtttactcgtcagacccattacagtgcttcccacccatcaggcactgctctgcctcctcaaatcctcctacttcacgatgtcggtgctggtattaccctcagttcgtagaataaataagcaagcacagagaggtgaagccatccgctcaggcccacacggccaggaaggggtgcgtggcgtgggtctgagcacctggctctcgcttcactttgcttctgtgccctgccctggactccagcctctcccacacgctcccctctcctctttcgctgctgctctttcttccccttccatcaggccctctcccctcttctgagatccattttgtgcctcatctgcttctctgccctggctgcaggcatttgtgcgcgtctgggctgcagctggccttgctgtttgctgtcagagagcccacgagcatgagggccacactttggcttcacgggtccccagagcctagcccacgagtgagggaaggcacgggccagactgcccattatccactcacacttgctctggacgaaagcacccagtgtctgcccaagagccatgagaaaggggcagcaggcgatgctggggacaggcggtggccccagccacggcgaggtggcagtgtggtcctgcaatctgccaggggggcggccccggccacagtgagatggcagcgtgactcgccagctgcccgaagagcatggtgagtggcagcatggtcctgctaactgccaggtgaggtgaggtggcagccatggtgaggtggcagcatggtcctgctaaccgccagggggtggcccaaggtggggcgtgtgctagcacgtcacagagaagtctctggcatcaaatgtttctccctaaaacaactttttaaaaactgggttttcaatcataaaaataatacatattggcagaaaaagtccatattggcatgaatgaggtgaaaggaaaagctccccttctgcccgtccctccggggagaagcacccgctgtaggagctgcttgcctgtgtttgcagaatttttctttgcttacctcccttgcttccaaaaacacaaacaggataattctgaacgttctgtgctgcaatgagctatttttacttaacacttctttttttaacttacacatccttccatgttagtgcatgcagaatggcctcactcttcagtactcacatagtatcccctgtgtagacgacggtaattcagttaaccgtccctgggtgatgtgggtttcagcttccatatctctctgtgcacttgtgtgaatatatttgaaggatatattatttgaggtggaattacttgggtgaggtgcatgtgctttacttttgcagagatttttcaggttgacttatgaaaagtgggaaaaacacaccccttcacccggaagttgggaaactgctctcccatcgccaacagtgaggattgccaaatgtgtgcctctgtgctaacttgagaggtaaaaatgggctagacctccatgaagacagtaaggacatgaaatatcacgaagaaatgtacaggtactggctgattcgaaagcacaaaaacattcacggaaagcaacaagtgccgaactttcaatagccccttcgtaagacagggagggctttaggaaaaatcttcaaccctcgctagatgttttggacctgacaagcaagaatcttatattccttaagattgtgattttatatatatatatatatatatatatatatatatataatatattttttttttttgagagagagttttgctctgttgcccaggctggagtgcagttgtgcgatctcagcttaccacaatctccacctcctgggttcaagcaactctcctgcctcagcctcctgagcagctgggattacaggcacccatcatcacacccagttgatttttatatttttagtagagatgaggttttgccattttggccaggctggtcttaaactcctgacctcaggtgatccgcctgcctgggcctcccaaagtgctgggattacaggcgtacaccaccactcctggccaatttttgtatttttggtagagatggggtttcgccatgttggccaggctggtcttgaactcctgaccttagctgatccacacgcctcggctgggattacaggtatgagccacaatgcctggccaattttatatacatatctttcttctagtgtttttctaaaccttgatgcttttcgcccaatttttctatagaataaaaattctatataaaattcaatgaaaacaaataagttgggatttttacaaaattctgaaattaagctacagtgaaattctgggaaattctctgcaggaaaagagaataattatacattcattccatattaaagtataaaagaattgagttgtgaattaaaagatagttcatttttcaagtttaaaaggccaagtcaagtactcttatcagaaatacaagcatagctatagggaattttcctgaaaagccttttcaatttttaattaagactgagcaaagctcaaagtggtctttgttgttgcaaagattagaaataaataagccatgaaggctcagctctaatttgtggctttaaaaaggatactgatgtctgacattgctctggaatcaagccaaggtcccctttgaaattgaattaatagatcttaaagtatttgctgcagagtggaggcctctgatgagatagtagagtgtacgtatacctctctgatcaatcttaaagtatgtgctgcagtgtggagagctctgctgaattctctgatgagatagtagactgtatgtatatctctctgatcgatcttaaagtatgtgctgcagagtggaggcctttgctgagttctctgatgagatggtagactgtacatatacctctctgatagatcttaaagtatgtgctgcagcgcggagagctctgctgagttctctgataagatggtagactgtacgtatacctctctgatcaatcttaaagtatgtgctacagagtggaggcctctgctgagttctctgataagatggcagactgcaggtatacctctctgatcgatcttaaagtatgtgctgcagtgtggagagctctgctgagctctctgataagatggtagactgtatgtatacctctctgatcaatcttaaagtatgtgctgcagagtggaggcctctgctgagttctctggtaagatggcagactgcacgtatacctctctgatcgatcttaaagtatgtgctgcagcttggagagctctgctgagctctctgataagatggtagactgtacatatacctctctgatcaatcttaaagtatgtgctgcagagtggaggcctctgctgagttctctgatgagatggtagactgcacatatacctctctgatcgatcttaaagtatgtgctgcagcgtggagggctctgttaagttctctgatgagacgggagaatgcacgtgcatctctttgttttggtgcaggcacacacaagtacactggaagtcttggttctttctcattttacttgggttgtcaccagtttctggcaggaaattctgcctcagctatcggggcccaagagccaaatgtgctccaaatctgggccctcggtgactgcagagatgccaccctttcctttcaaatgcaactgcccttgctgggggaggaatgtcccaggaaattctctgagtaacactgtgtctgggacaggtatctgtgctccgaggaaagaaatagttttctaaatagtttgtttttgtctcagaaaccagagccaggagcaatgacagggagccactcagttaacgcctagaggccttgcttattctggctgcgatcacagaaggcttcgggcgatgatgaggaaacgagtgtgaccctctcaggctggcttcacagggttagccgttggaggagagaaaacccacccaaattagtgaagtggaaaggtttcatgaacttctccagtttcaacaagtgaaatctgtgtgtttgggtgggactggagacaagggaagatgagggagaggaaggaggagagagggagagagacatcacatcctattgcatcttccctaaaacccagagtgcttcgcagccatgctacaggacgccctcaccataaagcaaatgtgggggatcattttaaattagttgcctcccaaaagggactgttctaaacaaaggtggccgtgcagccttgaccttcaacagggagtcccaacacttttccaattgcctcaaaagcagagattctggaaaaccagatgcaacaagatgccccaagactcacagcctgaagactgcggggagcctttgggccgatggggccgcttttataggacatgtttgtgccacaccaggtaagagaccacctgggacgtctatgtgtgtggggagaggacacgcgcagctgcatgctgtcggagctggaaggaactgcagggaccatcaaccccaccttcatttcccagagaaaaggagggacagggcccatggctgtgcagctggccacagcccagtagggtctagaactcagaatccggacaacccccatgccactgtgggccgcagaccagaagctcacagagctggggccgtggcctcctggatcctgctctcacacatcctgctgccacaccaacaccagagaatccaccgcttctagcaggaggacggcccgcaaacgctcaggggaaaggaaaaatcaggcctgatttcttacggagttggaaaaaattaagaaaagcccattttgcattttgaagaccaaaaatgtcgtgctaacgaagaatgagaagagcagggcctttttttcctctttttaagattaagggtaaatcgcatcctcactaaataagagaagctcatacatggtcttctcagaaacccacagagaaggaatgggtttgtgcttccacattcgggaagggaggacccaggcctctgcgacagctgcactgctctctggctggtcgggtgccaactagagccgactcctgcacacatagggtcccgggacaagcccttgtaccttggaacagagcctcactcaaacagaaaatgatgaacacaattttacagtcttgtcatgaagatcggaggagatgacaggtgcgcatgcttggcaggtgtgaagtgctaagagaatgcaggactgtgcaagtcactagcagaaaaacactttgtgaacaagaattctgggtaagcgcacagaaacagcatgacgtccatgtccacaggcagagcccgtgcatctgagcaggcactgcgggggccaaggcgtgacatgcccgcaaacctgtgctgtcttttctgctttaccacttgacagggaaaatggatagagatgaagcaggagcaccaagggtcaggctcgactcaactccacacacttcagggcaaggagcttttcagagcaccttaaagaacaactacaattccttcaattcactttagttcatgcatattcaccaggggctctgcgtggtccgagagctggacacaaagatgagccagacacaacctctgccttcgtggatctcatcacttagtgaatacctgtggccggcccagctgcctggccagtaaagccgccactccagccctcatttccttcctccaaccacagatgcttgttctcctgccttccttacggtgccatatgtcacgagtgccatgagacagggttccagtcaacaagaagtacagagaactcccaggggcttccagaaaagctttgtttttgtgaaaaaggggacagaggcagctggcctcatccagttcctttttctcctgcagtgaggatgtgattccaggaggtgttgtagccgcattgccatcacaaggcaccgaggataaggatgaaaaggcagtgcactgaggatgggaaacagaagccacaggaagatctgggctcctgacagcagtagttcagctgccagtgtctacaactcatccaccaccacgtggtgtgttaataagagaatgaaaccgtgatttggaaaactaaattaattgaacaaaaaaattaaaattatttaaaggttctattccttgcagctaaaagcaattcctatggatacatctgttttcataagtgaatttcgtaagtttcttgtttgacctgctttgaagtactgtcacgagaattcaagtcagataatgactaccttagtgcagtgccaaggcatcttctcatcctcatcaacagcaccgtgccgggggaaacctgaggctcgaagaacgacctgttctcctggttcattagaaatccgcccaggcaggggaacgtcggagctgtccacccaccctctgccaccacccatggggcctgccttccagggctgtgtgggggaggctgtgcttacacccagcagcatagagaatgaggggaggagagccacagacacaataaaggtgcaacctagggtcacggaaaagaacagctctggaccagacactgaaaaggctgatgaaatgagaccaggggctccagacatgggcaaacttcagagttgagagatgagtggaaatggcatgcaaagatgcttctgtgcattttgtggcagtttacagcattgcaaactcgattctaaggcaggcgtgtcctgaagtgggttgagatctgctgagctggggagcaagcccctgccagcgagcccctgatcccctccagctgggagggttacttcctcccagaaggattacatccacattgctcttagggctgacggacactgcaatggaagggactcaatttaattcacaatctggaagactcagatcagaaacatgacctttgacatagcatttggacaaaccagggcaccgcgatgcattggcttagctgagacacgcttctcaacttgcatctgtctccaaacacgccctcagagttaagaaacaccgcctcccccacctccccagacgcacggtgatgaacgggggggtctgtaaacaaaaggccagaccacacccagatttgggaaaactgcagtgaaacggcaacttcgggacacagggtgggacacaagcccttcctgccttgcccagcccaggctgtccctctgtccaaggctgcatctcccaccactgggaccccaccctcagggggtgaggtcttgcccatgacaggccctgtgtggatagggactctgggcactaagggtgagcgctgagcccttgctgcgtttcctgagccgagtcactgtgtaaccgtgggtgtgcaccaggaccagcgagtgaagggccaaggtgcagacagctttaggagctgcacatctcttggaaatgtggctgtgaccctggctaacgacgaccgtcaccactgatgaaaaggaggagtcctgatgactcttggttggaatctcaggtcccatctgggactttgctgagggggtcccagtaacaacaacgtggcaaaaattgtttggtcagtaggttcctctaagccatgaaccccacacacagctgtgagcacacacacacacatgtgcacgcacacgcatgaacacacacacacagtgcccctgtgtgtgctgcagcatgggccctctgtcctgatcaggcgtcctcccctctggtcctgagtgctctccatcctgggcctcccatctcattgtcgcccccagctggcatctcagtgacttggggctgctctgctggggccttcagctttgtccacagcactgttggtgaatacccctctaaggaagctgcctctgtctgggtgacagttccccagcctctcagacccttgactggggacagcgctataaaatgtgtgcagtgacctgctagttagttttcatccaatgcactggacacagtcctttccacagacaccagcatggggccctgccaggtggcattgggggctgggtccatcggtgtctccatgtgccctggcatggatgcactgtggtgtgggtggcacgggctccgctgcggggtgagtctacactctccagccatgtgggctgcaattcagtctagaccctggcccttccatgtcagtaacagcaacgtggagattctcaacagggggactttgccaatgtcaggagacgtttgatcatcacggggtgggggtggggatgcgctaaacagcctcaatgcatggcgcagctcccaaaacaagaattaaccggcccaaaatgcagacggtgcagagccgtggccgagacaccgtcctccagccccaggctgtggtgtggacgtttcataattgattcaatgatttccttattgattgatgcttacttcatcttcaggtctttgttaaacaggaagaccttcggcaaacaccgtttatttgtaccccttttacgcaggtatggctatttctgttggagagatttctggaagtaacacttctgggcaaaagggtgcatacatttaacattctgatggttttaccaaggtgctgaaatgttgcagggatttactctcctgacacacacccacgtgccctgggctttctggattggcctgcagtgactggcagacagtgacggcagaacaccctgtgacatcacccatgccacggggagctcaccgtgtcacctgctctgacgtcaccagtgccacgggagctcactgtgtcacctgctctcctggtagccacgctcggcatgcagaggtgctcggtgacaaggaggaattgctttactgtgttgtgtggaagaatgaaaacaggctgagtggacaaaggcgctgacagtgggttatcaccgagaggtctgtagagtggaataaaatatctgcttacacagaggagaactgcctcggaaatacaactatgggacatctttatatgaagtaaagaattactatgaagatgaatctgcaggaaggaagagtggtttacgtgataaaaatctggattagaagttggatgtaaatgtgtttaattaggtgaatacaactatgacaattcattacaagatgaatctcatggggattagtactcagtactttaaatacatcaatgttgatttttaaaaatcaccttaactccttttttctaagatcacagttatacttcaattatctcacattgtgaaatatgactgtggagtaggaaggtacttttgattagcttcactttcaatcactgaaggattgcaaatgaatgcaaaagttccctgcaatggaagctgatgtggggaagaagttaaatgggtccttctttctttggggttaaggcatgcagagaggaaaatctagtattttttccgaaatgaagtatttcctgatttaacttttgccttcccctctggtatgtcttctatctatgaggttagagtttaaaaaaaaacagaatttaatgtgttcctttcgttttcttgttaaaataacctgaaacaccctgctccagttgctgtctaaaccgtaaacaccctgctctagttgctgtctaaaccggaaacaccctgctcttgctgctgtctgaaccgaaaacaccctgctccagttgctgtctaaaccggaaacaccctgctcctgctgctgtctgaaccggaaacaccctgctcctgctgctgtctgactctgagacaacacggccgcgccaactcgctaagaccggcccagcccacggagtaatcctcaatacgctgtcacatacacgaaaagaaaatcaatcagtagttaaagtagatcctgattttaatagatgtggaggtttctcaatttagggagaattaaattagaagcagcttttcaacggttctgtccttagcttagagactttcaaaactcagggaagtcagattggttgaaggatactaccattttgggtaaaaccagtggcttttagaaaacagcttatggtattttggcagcaactatgtgttttagaagctgtgaaggggccttttttcctggagctcagatggcactggtactatttcaacctctaggtgaggtctgttttcagtgaccttggttggcattgggccggagcaggagggtggccctccacatctccactgtagcttgcggggcagcgccctgcacgttcccgtggtggggtgtcccggggaatcttacccagccggttgcaggggttccgtttgaagagagctcgcagcaaactctgtgcctccccactgaggaactgcggcatccccagcttggctctgaaaaacaagatcctattttaggatctattttaggagaacaaggacaagctataaagagggccccagtcagcattcagagacctcaatcgcagtcacccagagcagcccgtgctctaccacgtgggtcttaggacccttttatgctttaaaagttactgaggacaccaaagagcttatgtttatgtgggttacagctgtgatatttaccacagtagaaagtaaagtgagaaatttgtataatttccatttcctaattcactttaataaatttttattaataaacattatttaataataaaatcattaaaaaacaataacactcccattaacacaaataacattgttaatggaaattatctatgttttctcaaacatacatataaaaaagtctttagtggcattgttctgcacttgggtgcgtctcttcctggctcataggagacagctggaccctgtgctcggtctgttgcgatgctatgaagaaaacctgcgagaggaggacctgcaaaccccgggagggtctcaggaccaccggagtcctcagagcacactgagaaccccacgcgcagagcctagtgctccctccagaaattctccatccctcccaagtggaatgccctgaggccacacccgtgacttgctgtcagggattattccagctttagcaaaagtaaagaacatgtcctcccttaaaattcaaacaatgagaatcactgcaaaggtcctgacttgcagctctcagtgtctgctgcaattcaaggtcccttgatggaggaaaaggctgattaaataaaaagacactccttagcttgacaaaagggtcctcacaatggggcttccttcactcccctctctccttccatctacataaggaccgagcttacaaaagctgagctggtggtgttttaggtgattctcaattttataaaagttatgtgtccatttgcaagcagagttggcaagagcagctcatgaggacaaacagctttatgactcctccaccgagtggcctcacttaggaaggaactgattaggggctcccagcctctctgtttcctgccctcctgctgtctgctctgggacagtgatagtcagtggtgtctgctcacatttaggatgctatggcaaggtggtatggggatcaggcttcttcctacagtccaagagcaaaaccttggcttagtaaatgatttttcatgagaattaagcagaaaatggtttgtatccagtcacatggtaaaacgataccgagtcctgccaaggtcaaccaggagtgctatatgaatggggtcagcaggtggggagggaaaggagacccctgctcctgtgatctctccggacaaggccctggaggccttgtgtctttttccgtctatcctttacttctgggaggtcaccaaccatcacgcttgaaaaccagccactacacattctaagtgacttactgatggaaaactatctatggtagaagagttcatcagaaccactcagcaggatgagacaaaccagcaactgctcccttgacccactgtcattagaatgcccagcaccctattaccactgctactggcggacgagcgctaccattttgtgtaaaaccagtgacttttagaaaacagcttacaatactttggcactgtaagcctagcaatgtaattaaaacttcacagttccaggttcagaggcagcagctcttgatatcagaaggtgctcgcaggtctctggggtggctcccacactactcacttgaggatgagagccatggtctccttcctgtccttcccctggaacggcagggaccccgtgagcatctcaaactgcagagcaacacagagcacagtgagttcattcatccagatggacccggcttcacggcagagtaccccagcagggcagcctgctaccgtgtccatttcctcatgcaaaatctccatcagtcaattgtagccactggcctacgtgcttggggtacaacagtgactaaaactgcctcgcagagcttgccatttggtgggtgagacgggtaaatgacagatgtggtagataatcacactctgtggcaggccagcaggccccgagtacgacagagaaaagaggcagagcagggtcctgtggtcaggcagtttggacgaacacatcttacacgcggtttaggaacctgtcctgccctggcaggtgttgtggaagggatgagctaggaggaggaggaggagaacagctagctcatgttgaacacccatgcatgcctggatggtgggggctagagtgcttccagcatgagatagacctgaccacagccattagcctctgacgaggacaatatggcacagcaacctctcagatacagctgccgcaccctacatccttattttgttattactggacacctgccaggacggaacttgagataaggaggggatggagcacagccttgtctgagcatgggtttctttcttgcaccaactcccccgggcacatgcagtggtgattacacacactctggaagcagtggcctggaatggtctcatcagagcaaggtgcacagctgaccgcttctcacaaaagaaactagggctgcagcaggaaccaatcttttcataaaataagaccctgaatctaagtggaatgtgcccaaggatcaatcctactcggtgtctttcacgtcagtttaaattacggggaagcaggtgtttccatggtcttattgaattctctctcatctttattttttgctgcgtgtgtctctgcccttttagaattcatcctccagcattcgtcctttgcagttcgaaaatctcaggagatacacaaagtagaaagaccaaaaaaatcacgcagaattccattacccaaagatatccaaacttaacatttgttagttcctcctagtacttttttcaagctgttttttattttgttttaaaaacacagataaggttttgtatactaacttttcacagaataatataaaactttcaatggttatgatgaaatctttgtaatatcacttaacaaacatggatatgacaaaatgtatagtgagtgtatttgttgctgtacacttaggacatttccaattttctgctattgtaagtactactgaaatgtgcacagatgatttcctaagatttattcttatgataggctgctaggagtgaaattataatcttaaagaaatgaatgcatttaaggttttattaatattaccagtctgctttctgaaaacaacattataaaagaaatggaaactcttccaccagttctgacgtttgaagcctgttctgtcacattaaaatgtgctgtccatccggtgcacagagtaagtgagggaactcagagcagacaggctgcaggcaatcaatcaatacaaaagtaataaaaagcaagcggaagggggtccagatgagaactgaaaaagagacaagtgtaattaaacaggaaaggccagaatgctctgactggcagatgagctgtttgtctggtaaaacaggatgaaagtttataagctgatcatacacactgaaatatctctcagaatagaatggtattagcaaagggaactcctttcctattctgctctttcttctttctttcttgagtctattaatagcactatgaaatcccatttccaaggacaagccttctggctacatgaaatgagaaagctgtcatcccatacacaccgtttaatccttgttacacaaatggtgcctgtccagatgcccggatatcatttattttttgctgatggactggtatcttgcatacatttgtttggtgatttctttttcttttctttttttttttttttgagatggagtctcgctgttgcccaggctggagtgcaatggcacaatctcggctcactgcaacctccgcctcctgggttcaagcgattctcctgtctccacctcccgagtagctgggactacaggcgtgagccaccatgcctggctaatttttgtatttttttttttttttttttttagtagagacagggtttcaccatgttggccaggctgaactggaactcctgacctcaagtgatccgcccgccttggcctcccacaatgcttggattataggcgtgagccactgcgcctggtctggtgatttctttttagcttttgaagatgattcccttgtgatcagggtccactgctttgtggttctctctcttcctccccttcttcctccatccatatggtaggaggtccccaaccatctactcagccagagaacacccagcacagcacccatgaatattcaacaactgcttcttggtgatgaaggtgctgctgacggtggggatgatgctggggcggaggtgtggactttgcagcctccaccagccatggggttctgctgcctttcccatccccttatccacccttttctgtggagaagggagatcatttcagtatgattgtctgaatggagctgcccgggaactttccagtgccgaagcattactgactgaggttttgctgatgagtttcttgggacgttatttacagtaagacttttgctgtgttgctgagcagcactgagacttgccaaggcttccggggtgaactgagaaaagccgaggttcatcttggggttcccacagtcaagtacacgcaccgggggagggagggcactccaaaggattctttcccaatcggcaccgagaccaggctgcagacaggcacagaggggctcaaggagatgtagccaaagctccaccgggtgcaggcccgatgcttctgggaaggtaattggacagacataacgcagtgcttctcaactggggtcaccgttgcctgccaggggacatttccggctgtcatgcccgggagccctggtgctacaggcgtccactgagggaggcacagatgctgctaaacatcctatgacacacagggcgccccacaacaaggaagtgtccagtcccgacctcaacagtgctggctgagaagccctgtctaaagggacagctaaggaacctggaaagagtggcggccccggcacaggcaggatgcgcctcatggaggccagtggtactgggggcaggggaaggaggagactctggggagacccttggtgacaggagcctcgatttcaagtttacttggccgatcaccattcttaaaagggcaccaaaagcaagctaacattttaatctgaaaacaggcgaggacaagccctgacctgagatggatgacttgaagtggtagagggcctggctttgcagggtatggaggggctgggtctcggagagctgtgttgatccatgcccatgtgtggaggtccctgtgtgcacagacacatgccctctaatccgagctgctctcgctccgtgtgctgcaccccactccgagtgccaagaatctcagtctcaaaacagccttggaaggtgccgttcctcacaaccgtctacagatgaatggtccagtggcaagcagcagagcctgagctcagaaccatccgtgtttgctatggtggcataaggacacatcacatggcacctgaggcgggatgtccagaacattccgtgcccgtggttaagaaacgggagaaggataaagtggtctcacgaaaccagagtgctcaagagatgctttagatgtttacaaaacagcccaaatatccttctagaaactggctccagcctggcgtagaggagtgctggaaattctacaaatgtcaccacgcagccggccaccaggtttgcacgttcttctccaggtaccagctcctaatttcagacacggaattttattcagggacactgacttcctgcccctggcacaggcatccttccttccaggtctggggagggcacttgtggatgctgctcctcgggaagagatcccagcacacatccacctccaggggacggacggccacccacacatgaggaccactccctcagcacgcggcctccagggtctcagccttcttttaaaacaaggcccctcacacgcacaacggctctgcaccgatccgcttacaaggcttgggtaagatacgacttcaaaggtcacccgaggcccatctcttagctgcaaatgagaattcagaagtcacttctgatgccacccacggacgtgtgggaagcgtggggcctccacagtcaagacctttgcctgtgtgcagccagtcaccacgtgggcgggcggcactaaatgagaatgtgtttctgggactattatgtgatcttgagcccgacacttaggctctttcagctttagttttcatttctgtgcacagaaagaataccgtctttcctgcccggcttggagattgttgggttgagatcaaatgtgaagatggccaggcagccttagcttgtggtcaccacggcaacagccagccctgcctcgggctcgagagtgacacagcagttctggagccggaccccttccccagctgtcacgagacattgaatgcgggacgatcccagcaaacaagtgaacaattcagtaagaaatgtcctgtgcccagggaggcacgtgggaggagagtgcctgctgtgttgacgtgccgggcagcgctgggccaggcctccttcagaagctctcaatatcatcttcttcacactccagggacagggagggtggggactccaggatgggtgaaggctgccgggcactgggtctgggtgtgagtgcctctctgcttccaccctgttgtcttcactccctcatgggtcccttggaggcctggccaggtgcaggcacttttgtctgtgctggggcatcttgggtaaggtgactggtgtttaagaaactccacgtgccaggagacactcacagagacagacaacgacaataaaagatggcagacgttagagcagtggcaagccaggagtgctgagaagacaccgaagccagagccaccagccagagccaccaacccggccagggtcagcaaaggccactgggagtggtgcttctgtcttagggctgatggtggaaggggaccggggggagtttgctggagcaaggcgagcccgacgtggtctcatttcctcttcttctggcccctcgtcgtgtctccatctttggatcattcctcttctgtctcttctgttctcctatttctttttctttcagcttctccatttgtcttttcggtttgcagtgattaagaccagaagaactgggcgtggtggctcacgcctgcaaccctagcacttctggaggccgaggctggcagactgcctgagcttgggggttcaagaccaacctgggcaacacgatgaaaccctgtctctactaaaatgcaaaaaaaattagctgggtgtggcgggtgcctgtagtcgcagctacttgggaggctgaggcaggagaatggcttgaacccaggaggcggaggttgcagtgagctgagattgcaacactgcactccagcctggtgacagaatgagactccatctcaaaaaacaataaaaaattaaaaaataaaaagaaaaaaaagaaaaaaaattaaatatatattttatattatgagataggttttatgatctgttgccttaatagaagaaacagaagactatcaaatctcccctccccctgtccccccagaaacctcacaaaactaagtccagttggttttgacttatatgtggtgttttggctgtgcttttctctgctaagttactcctctccactccagcctggcctcttgttctttttaaacattggttcacctgagagccaggtggcaacattttatgaccttgttcattacacaaaggctggcccgcagtactgctggatgggccacttgtgagcccagagttataggacaggacccagagacagaaggatgccaggagccctttcagggagcctggatgtgcagcgtggccagccctgctctctgggggaatttggggttctcaggagggggtttaagaactggaatctctcctgaagccacagactataagcttggacccatagcccagcgtcagcaaaggcaacatcagacttccctgcaccggcaaaacctgcaccagcgtgggaggtctccacagggctatccccgctgccctcacccaccactcaccagccagggtcacacaggaaacccacacatgtggaagggagtggacctatcgaggcagaaatcacctccaagacggcaaagcaaacctgcctcactgacctatctaaagaaaacctctttcagtggaaggaaagcagaggtggtctcagaggggtgaccgtgggggacttagctctgtggtctccgcatggagaggacctgctccttagccagtgccactgaaggtctgaataatagtaaaaaataaatcagcagcatcatcctcttggctgagctcgcgggccccttgctttgctgcaggcattctctcaagtgtcgtgcctgtgctcacgtgttgaactgcacgactgtctgtgttgtgactcactttacaggcaggaatgaccagggacggaaggggcttccacaggaaggagtagccacaaacgtgatgtgggcatctccgactgcgaactggctttctgggttaggctgtgggcccatctccggagctggtctaatgtgtgtctgcccctcgcggagaggtgagcagcccgtgcgggcacgtggaacacagccagggcctgtgagctcccggggctgaggccggagcctggagagtgctgcagtgacccaagtggcaaaggaccagcgaggccctgggcaccagccgggggttctccaggcgacaccgcaggactcagccctggggttccctagcaaggggacgaggagtagggtgtggtgggaggagaggcggtcaaaactctgaagggaactgggtttggcaggcacacagttctgccacacgccagcggagcaaccttcatcccgtctcctaaagtgctcatggcctcagtttcctcctgtgtgtgatgcacaggccggagggcgggatacccctgaaatgccacgacccgattgtcatccaggtcagattccagagcactcactgcacgcctgctccaccctgaggtcaccagccccctgcccagctgggagagtgggattgggggagggagggagggtcctgtgaagattgggaaaggagcccacacagttcctagggcggagaagacccagtccaaactgggttctgttaagcactctgcctgcgaaaacgcgacagagacaattcacatttccagacgctgatgcaaaaatgcctaactccgtgtacatctcagtttgtaactaagcgcaaggattctgtgtctaaataagaaaaatactttaactcgaaaatcatggcatctcttgtaatcatcacgctaagcccgaagagcacaaagcataaagagggttcgactcctcccacgtctgcgtttctgcgttctcgtttgcatcccagccccactttctgatggtggggatgtgggatggggaggaggctgccaggaaatgcttggcctggacacttgcccagtgtcccaagccctcaggcactgccttcttccgcatttcgggacctctgaaccaacctggggacaggggtccacgtggggaacagccgccatggcacagaagagggtcggggcaggctcaccatgagcacgccgaaggaccaccagtcggcactctgcgtgtgtcctcgccggttcaccacctcgggcgccatgtactcgatcgtcccgcagaaggagtacgctctcttgtcgtggtcaatggcctccttactcaggccgaaatctacatgcaaacacagcacacacactgcctcagtctctgggtgtgttcgggggtccacactcaggcgggcatcagcgtccttctgtgggctctgccccctctccaggtgggcgcagcagagccctgctcagcaaaagcgggaccatgtgagtgcttcccgaagcccgtcagtgcccgaagcccgccggtgcctgaagccgaaatcctcaaagcgtgaggagttccttatgagtgtacacactcaggagcgccttggaacaccacccagacagcaggttgtcagtcagtgacgggaactcccccagacccttttccacaggcacgtggaggtggggtgttgcagggcagagggacctggggtggaaggcaggtgtgtggctgacagctactgggaaaggggctctggctgccggggagccaaggggaaggcagagtgtggcgaacctgccctgccccgacaacacgagggtgtggagagcacagacaggcggaggaggcctggggagcagaggccgagctatgatggaagaacagggatctccaggtgccacagagcaaggaggggcttctgaaggaagtggccccggggctggaaagaacaagagtgcattggctcagggcccccaagtcttggggatgacagagcgtggctaaatagagccaaggcaggcccagccagtgggtagagcagcagtgcccagagaggccatgtccttgcccctgagcctgggaatgggccaccttatgtggcagaagggactgatatggtttagctgagtccccatccaaatctcaccttgaattgtaagaatccccacgtgtcgtgggagggacagagtgggaggtaactgaatcatgggggtgggtttttccagtgctattctcgtgacagtgaataagactcacgagatctgatggttttatacagggcagttctcctgcacatgctctctctttgcctgctgccatgtaagacgtgctttttctcctccttctccttctgccatgattgtgaggcctccccagccaggtggaacagggtgagtccattaaacctctttcctttatgaattacccagccttgggtatgtctttattagcagtgtgagaataggctaacatggggactttgagaacagactaatacagggactttcagaacagactaatacagggactttgagaacagactaatacagggactttgagaacagactaatacagggactttcagaacagactaatacagggactttcagaacagactaacacagggactttgcagatgccattgaggatctggagataggggatgaccctggatttctgggtgtgcccaacaccattgcaagggtcttcaggttaggaagggaggcaagatgcagtcagagagcttggaagatgctgcctgctggcttccaccatgggggacgcagcccagccaaggactgcgggcagcttctactagctggaagaagctaagcaagggagtctcctctagaggcccccaaaaggcaggcagccctgctgacaccttgatttcattcctgggagacttatttcacacttggggcctcctgacctgtcaggtgataagtttgtgtggtttaaagccccgatgttcctggcattttgttgcagatgctatagggaactaatacaaatggggtgtcctgagactagaggagctgttgccagtttgactgaatttgctggtggctgccagggctcagatggaaacagggagggaagtcacgtggccaccaccacggtccagggagtgagaaggaggcagggacagcatcagtgagggcagcagtgcaggccgcactccagcgagactccagatgtctgccctcaggttggcactgggcatctgcaaggcccacattgcaggctacactccagcaagactccagatgtctgcactaaggtcagcactgggcactgggactcctgaactaaacacccagcgacgctgaaggagcccagcaaacagaacgtggcaggggagagggaaaagaaggggccaccgggaagctgcatgggtctggacgttatgaagacatacaatgccataagcagtctgtagctatagaaaattctgccaaatcagagacaagcatctggcaaagggaagggcggtgtaaataagagggcttgggctttgaggtggtccccaaaggtaccagggctgagatgaagccatggagggggcctgccgtcttttacaaacctgtgatcttaatgtgcccctcttcatccaggaggatgctaaaagaaagggagagaaaacagatgctttagaaagagacccagcctgccgacgggcacgcagagctcagaggagagctgcggggcagctgggggcggacgttttcagggagccctgatggagctggcccaggagatccccacggcttgtgcggtgggccttcccatcctgcctcgcttctccacagctcccagctcgagaaagcatttggtgccacacctcctggataaagggatgtgtgttcgtgcagctggaggactgctggctttagatattcgtgggtccccagggaaggtctaagagccctccagactgctgtgcgcaaagcataggtggagagcgtcctgggactgctgtggcctgtggagacccagagcctcgcagatggaatgtttctgcactcgggatgcccttgatgtccaaagacccccttcttctcccatgtatcctcccctgagccctgccctggctctccagacccacccaggtgaggcctgcacaagcgggggccaaggcatcgaggagcttcgggcttcagcaggtacatcttgtgatgagacctgctcccggcttggcacccctgcgggccactgggtccctgtcttgttccctgccaagcccttgtcacgccatgtgccggacgtgacagttgcctttgctcctcccaggtatcctgccgtggggtgaaccctgcatagagaatggaggcagggtccgtaaagggctgggtgcaggcataaatcccttcttccctgaacatcaggcgggagtctgggctgtgataccttgacacacctgtggccctaaactttccccatttatttatttggctgtaattaaatcctgttcttccagatgctgggaggtaccagcctagccctaaagagaccaggaagtgggctggaaagaaacaaaggcaaggcttggaggattaatctgtgatacctttatagaaacctgtgaaaggaaggaaagcctgacttgctacagcacagaggagcccggaggacattatgctcgattaaataagcccgtccccaaacgacaggtattatatgattttacaaatataaaatgtatggtccctagaggggccagagtcacagagatggaaagtggatggcgggtgccgggggctggggagctactgtgcagggggacagagctttagttctgcaagatgaaacagttctggagatggacggtggggatgggggcccagcaatgggaacgtgcttaatgccactgaactgggcacttaaacgtggtgaaaactgtaaaagtcatgtgtatttttctacaattaaaaaaaatctgccacagagttaaaaaaataaccactattttctggaaatgggaaggaaaagttacagcatgtaattaagatgacaatttataatgaacaaggcaaatcttttcatctttgccttttgggcatattcaatctttgcccagaattaagcacctttcaagattaattctctaataattctagttgaacaacacaaccttttccttcaagcttgcaattaaataaggctatttttagctgtaaggatcacgctgaccttcaggagcaatgagaaccggcactcccggcctgagtggatgcacggggagtgtgtctaacacacaggcgtcaacagccagggccgcacgaggaggaggagtggcaacgtccacacagactcacaacacggcactccgacttggagggtaattaataccaggttaacttctgggatgaccttggcaacgacccaaggtgacaggccaggctctgcaatcacctcccaattaaggagaggcgaaaggggactcccagggctcagagcaccacggggttctaggtcagacccactttgaaatggaaatctggccttgtgctgctgctcttgtggggagacagcagctgcggaggctgctctcttcatgggattactctggataaagtcttttttgattctacgttgagcatcccttatctgaaatgcctgaaaccggaagtgtttaggatttggggattttgcaatatttacttatatataatgagatatcttggagatgggccacaagtctgaaatgaaacaaaattcatttatgtttcatatataccttctacacatcacctggagctaatttatagaatattttaaataattttgtgtatgaaaccacgtttgtgttaagtgcttatgtgtggaattttccactggggggtgtcccattggggctcaaaaagttttggattttggagcatttcagattcggatgagggatgctccagctgtatttacacacgtattcaactcacatgtgtgcctgtggcgttccacggactggtggtgaagtcagatcatcaagcacatgggcaaatgcattttgcatcctgcagtggatatgggatgtgacctggtttctgggtaaacccagctgtttcccatagatgacagctgcatctaacaacaccagcttcggagcagggcttgtcttttctcagttccatgcaggtgacagggcaggaatgtggagtagcaactgggacgcgtttgcagaccccagggcccccccttggtcttagctcacaggcacggggctctctggtggtacccaaggccggtcggtcccaccaggccacaggtgatgcctcatctaggggcggctatgggccctggtctgggtgggtggcattaatcggcccctcagggcagggaagagtgagtgatcacctcagggatactgctgaggtcaactcaacctaaaataccatcctccaaatctcttcttttctaagtggatcactcctagttatgtgtcaggtctacaaagaatatgtaaaaacaacaacaacaaaatgaaaatgggaacactattattttggagggactttactgttcaaaaatctagaatagattagcaaaatatcgtagaaataatagcctcacaggtcaccactgccaaggatatacaaatctcagtggactctgggtctgagaattctggggccgttgtcttttaggtaagttcttgggagagctgttctgactggggacctagaggtggggctgacaagtaactgagtagaggttcattgaccacattcctgggacttgctgaagtagatgaaagggcttcctgaatctggaggacagtagggaagagatgagagaggaggagaaactgccctggaggcagccatgtttgagatggtccccagtggccagatgagcctcacccaggagagagggcgggaatgtgggtcagggtcgtgggcgtgcccctccccagctccggcttcccgtgcatcacagacatgcacctgagcctggcctccctcaggcgttatgagtgtcaggtgagaatgggcctgggcatttcctatgcaaatcagcaaggccacacctgcatctgggcacctgatgcctgagccggtcctgccggcacaagagtctccccagcctgctctctgatatgtcctcatttaggaaataaatatctagcagtggctaccaacatgggccaggaaaatacatggagctgatgggcgtggggaagtcagccctagttttttctcacttacttctcaggcttcagatctctgtagatgatccccaggctgtggagatggtctaaagccaaggccagctcagccaggtagaacttgacatcctcctccgtgaacatgacctagtaagaaaaaaacaaaaacaaaaacaaaaaacgtttaacttgttttatggctggtgtgttttaaagaactctgccagagagactgagagtccacactggggtcagtttgctctgtggaacgctatggccccccagagtggtcttctgactcttctcatggaaaagtgagttccctctgcagttccaagatcagtggatggagacgagggcttcctgcacaggtgactcatgccgccttgagagtggggtgctgagattcagcctctcctctctgtgtccttctcacccctgcaaatcatttggctctggagtaggtttctgggtttacattctagcatgagtgctgctcatgtgaattcataacaaatgtaatacaagtaagacgctgagggcttgatgaggtgactgaaaatggggctcaaatatcattctttccccatggattatctatctccactccttgggttgatgcaaactagtagcctacgtaacctgctgtcaacccaaagtgggattagttctaccaaagatcacccacaggtggtacagagttggctatgggtgccccaagctgagggggcgggatggggaggggtttccaggtgttggggttggcagccacattccgggatcccacgtagctgggacagctcagggctgggaggtgaccaggcagggatggcctaagtgtccatgtcccgggggctcactcaggccagccgaaacatgcatgaggcctcggagcccaacagactccaaagccatcgccccataatgactcatccccacccccgacttgttagaatcagcacatagattttgtagacccccttaagaggaagcaaaatcatgaccacaagccattttctatattcgtcaggagaaatcaatgttatggagactacaagtccacatgattactgaattctctccggtaagcagacgtgaaaaatcagcacgcagccagaaggctgcccggcaaacacaaaattagaagggcagccaggggacctgaacggtgagtggcgtcaggccgacagccgggcacccgcttcacacagggggttcttccacagggctggacacgcaggctctgcatcctgacagtgactggtgggtgccagccacccaccggccccccgagtccccgtcctccattccacgcttggccagcgcctttcccggatgtatgtttcttttctagatcggttaaggtgctcagtggactgactgacagcacgttctgctagtggcctggttctttcctctgacttgacatatccacacgtggcccaccatgggttttgtgtacaatttagggctcagaggcaaacctgtctttccactcccctagctcttagtgtaacccccaaggacaatagcaggaagtttctccatagaaagggaacacctcacggtgtgagttctgcaggttcaccggcacagcgatggtccccgtaagatgctggaccccgtacttgctaaatgacgacccaaggtgagttctgcaggttcgccggcacagcgacggtccccataagatgctggaccccatacttgctgaatgaggacccaaggaaaagactttccgcaggttcccagcaactccacgaatctgtggtgcccgccctggacaacttccctcctactccgaaatgaaggccctcgggggaggcacacattcccacgtggggagctgcaggactttttgctgattactgttgtctttttggtcagggggcccaaccacaggcgtgtcatagcagctgctggacaaaactggaccccaaatggactgactccctgtggatgagaggggagtggacaaaccaacagatgataccacatgaggaatgggcagacaccaggctccagcatctttggaaatggccacacagcaggaggcaaaggaaggggccagacgccagttcccaaaggcctttgtgtagagcttggatcaggttctcccggcccactgtttttcctccatgcaaggagccccacagaaacgtgcaccactgtccaagggactgctggacgcagagggacagggcagccatggtctctgggaccctttgcgcccgattcaggagcagctctgccttggtttactgttcatttggggctttgtgcaagacagcggggtctcctgctgaaaagggggaaggtggggaaaagggagtggggggtgtgaaggccactgttgctgtgaaagcacctcggccactcctttgtataagagatgaacaagcaggatcgtcagaacggaaagcccggcactggcactgccatgggcagaatctgccttttgccatcccatgaagcggggtgcttttcacgtcaatcagggccacggggctctcagggtgcagtgaagttgcatcctggagggttcctacctaaggcactggaggtcaaggagaagccctggggtgtgcagtagcggctgtgagacaaaggtggcgtgcgaagaccacacccgatgctcccgaacagccccaatgttcagccggcttagcagtacctccctcttccctccctcttcccaggatggaaagtgagaccctgtgagagtctttcccagccgctcctacccaccgacctgcgccttccatctgcgctagctgggaggtcaacagcgtgacttatggtcccagagctgcaggggcgctgccagggccacctgggacgattgctagggccacttgtgcagcttccttagaaccaggcagcaatgcacacagcacacccaacacacacacacacacacacacccaccccacatcacacatagcacacaccacacataccacatacagcacacacacacaactcatacatacacacaccctacataggcacacaggatgtcaaacacacagacaccccacaccacacaaagcacataccacacataccacatatagcacacacacacccacacacaaacacaccccacacatacacacaccctgcatatgcacacatgcacaaagcacaccacacaccccacacatagcacacaccacgcacaccaaccccacacatgcacacagcatgccaaacacacccccacatatacacatagcacacacaccatcacacacagcacacatcacatacaccacaaatcacacgcctgacatatacacacagcacacatcacacacataccacacacttatcacatgacacatgcacaccccacatgcacacacactcacattcccacacaccatgcacacacaaccccaaacaccacgcacacccccccacacacgcactcaaacacatacacaccccacacatcacgcacatgcactcacacagcccccatgcaaaccccacacatgcacatgcagtctcgcaaccccccaccacacatcatgcacacttgcacacactcacacatgtacacctctcccacacacgcactcttgcacacactcacacatgcacacacccccacacacacacacgcactctcgcacgtgctcacgtcctctcaatgctctccacccctcctcccctcgagtcccagacagaagctcctgcccgccctcctgtgtgatgtggcggctgctcacctctttggagagccgggtgaagaggtcccctccccgcaggaagtccaggatcaggtagagctttccttccgtctgaaaggctgtgggggacagagacccgcattttgacagcttgtcgaatgtcctgtggcaacatcgctctctggcttctccctgctcacggtgctgcttactccgggaggctgagtcacttgagaaacggcaggaccccggctggtgaccagctcagaggggcagcacccggcagagggggtctgacactgtgagcgctgcccctctctcactgtcgttagggggccttgagatttctttcatctttctttcctctcccctccctcccttttttaatcacaaaggaattgaaagatacacggggagaaagatgtgaatatttaagctggtatcgttgctggcttttgtcgtaatgcattagtgagcagcctgaagatggctctggtgggtttggaggacatgtcctttccgtcctatggaagtgccttcttcttacagaactccactctggtaccagggagccccccgcttgccttcctctcttgaggcagttctggtgataggtcagcccagttatttgaacatcaacaatggggctcacgtcctaggtctggtcactgtgagctataactgcagactttctgtttcaggccacaggcaggctacacagctcctgcccacactcagcaagggcctgcctctgttgagcgggcgcatgagcacgggagggtctagagaagcccgtcaccatcgctgctgtgacgatggttgctgcagtggcactggtgaggcaccgcgtggcatcttttttatctacaaaggaagtgtggctggaagggatcccaatatccctgcatactagaaaacgttttattttctaaaagtaaatgctagaagcatcataaatgtgggggttttagaaacatagcccccagctagaaagccctctgccaggactgtgtaaactgagtgtgcattaaatgctccatcctgggcttggcaggcaggtggaggtgctgggtcaccactgaggtgatgtggaggtctgtttaaagctctttgtaggacacccagttctcaatttcttcagaaaagcaccctagcaagtaatgtaaatgacacgtgggatgggacttgacaccagccacttggcagcagcggagggggcagagttttggaaagccagcctctgcagcctcctctgccgggaggtagaggtttgcaactgcgctgcccacggccgagaaggaacagcagggtgtgcccagcttctgcaggcctccttcatcctgtcctcagattcacgcaaatctcactaacacctccccgacacaccaccttgccctttgcaaccaagaacaaactattagttttgttgctgttcccttctgtactttgctcatctggattattaggtgggaaagtttaatgtaataagccatgaatctgcagccaccatctcatcacatcttttttaaatttgaagatttcacttactgcttctctgttgggataaaaaggcagacagcaaatgaagagaagttgtgtggcaaagcagctatgtggcctttggttaattatttgagcctcagaacatgaaaataataagctaccttgaatagaagttttgagggttcaacgaactactatctttaaacatgatattcatttgaaatgaggtgttaccatttctggtttaaagaaattattgggtcatagagtattttattctaaaacaacacaaaaataagtcatagattcaccccaatctaggttaagatcttctaaattatcaatggtatggtaataatttaataatggataccccatctaaaattagatctttgagatgaaaacagggcttcttgctctttcaaagaaaataaatacagaagagattaagtgatcaggatagaaggcaccttcctccccaggcagggcaggactctatggtataggaaagattttcttctttctgatctgttatttctttttcaattttctttgatctggagaaggttgccctgggtcctctttaaagtgtcattttgactctacttaccataatgaagcttcacaatgaaggggtgattcacttctgccaagatgtctctctccatcttcgatctcactcggtcccgaactgcaaagtaaaaagataaaggctttcatgaggcaggaaataagagttctgaggaacactgaacatgaaatactagatataattcccgccaacttttcattaaaaaatttcaaacatatacaaaacttgaaaaagttgtacaataatcctagatttaacaactgcttacgttttaatacatttgctttctctctctcatatatatatatatatatatatatatatatatatatatatatatatatatatatatgcatctctagctctccaaaaaattgtaggcagcacgacatgttactctgaggtgcatgtgcaggtgtctcctaagaataaagacagtctcttagcataactttaacacctactgtgccacataggaaagccaacaatcactccatgaaacatctaacatccaatctatattcagtcctcccctccacgtcgttttcccgacctaggatccagttcaattatattggttgttaaatgtctttgttttgctcctagaagacaatggtcccatacctatttccctcgccctgtattttttcgtggactttttgggaagtccaggtcagttttcgtctgtagaatgttccacattctgggttcgtctgatggttgctcatttgctttctaaaactcttgtatttcttgtaaactggaggcgtgataagattggggctaaatgattttggtcaccaggtgatgcctgtactttagcctgcctcagatcagggggtgcctgctgggctcaccctctctgtgtgatgctaaacgtgatgtgtggttgaggtggcaggtcaccatctctccatggaaaaggtcttcatgtccctttgtaacaagaacctgtgggctgatatctggcatagagtgacctgcgggttccctaacaatccttcatccaatggtgtgagcatacatacgtgatccctgcctgaatcattcagggctaaagaacagccatggtcacatttctgatggaactggaaatcaagaggaagattccttctctccctctccatgaagataaccatggaccatgtactttctgttgaatttagtgtgttacaacagctacatattcttcttagtgctcacactatctcaagtgtggccatctgggaatacagatgtaattagttttgatgcagaaacaaatgaacaaacaaagagcaccacttgagtaaaaacagctttagcattcccctgggcaagctgctacacccagggcagtatccgggacctcacacagccccatgagcgatgggagaaaatttcttcaaacattgctattgggacaaatatgatcagtattgtatcatgggccaggtatttaaatttatccatatttaggacttgtgatacatactgctaaagttttatttaagaaattcttcaccaagaatgctgcaataataaaaagaaaatagaaaattacaaactgggaggatgtggagaacttggaaccatcatgcattgctgatgacagtgtaaaatggtgcagtcactgaggaaaatagcttggtagttccttacaaagaagtagaattaccatgcagcccagcaactctgctcacaggatacacatccaaaaaaactgaaagtatggatttgaacgggttcatccacccatgttcatggcagcattatttacaacagaaaaggaggaagcaacccaagtgtccatcaacagatggatgaacaaaatgtgatgctgtagtaaatacacacacacatacacaaacacacacacacacacaatgggatattattcagctctaaaaaagagtaaaattctaacacacagtatgaatgaaacctcaggacattatgctaagtgaaataagccagacacaagaggacaactattgtaggatcccacttataagagttgcccagagtagccagaatcagagagacagaaagcaggatcgtggtgaacaggagctggaagggggagaatgggaagtcattgtttccacctgggatgatacaaagattttgggtataacattggtgaggacaacattgtgaatgtattgatgtcactgaactgttcacttacaaatggttaaaatgatcaatattatgttatatatgtcttaccacagttaaaaagagaaagtccttcctcattcctgggtccctgagtttcactgtctcaactcctggttttaatactcacacctaggattcaggctgtctgaagtccacctttgtctttggtgttgggacagttttgctttcccgtttggtctgtaatactgtctccgggggcccaggtggtgaccgtggtgtatggccctgcaacccagctcactgtcagtgtcactgtgccctactcttggctttggtttcctcatatacaaaccggatgagatggctccccctcctggggctgcctaagaaacctgtgcagtgatgtgtgtgccacaacaacacggggcccgcccacactgtgccgcttcaggtgtcattgcagtgacacctttattatatgctcagatcccctttttttctttttctttttttctgatctctccttgctgttccactgctctgcccatccctcttctaaccccagacccttgtcatcaccgtggtcctgtgacattccttacagcaggggtgtccaatcttttgacttcctgggccacaccggaaaaactgtcttgagccacacataaaatacactaacactagctatagctgatgagcttcaaaacatcacaaaaaatctcataatcgtttaagaaagtttacgaatttgggttgggctgcattaaaagctatcctgggccccatgtagcccacaagctgtgggttggacaagcttgccttagagtctagacaggcatcgagtaggcacccagcaggcagtgctgtgggcagagctgggggatactagtgtctcccctaaacctcagcacctccttccccagtggtcctcgcagttcctaatcccttgagaccaaaacaccaaggtggagggtgcgggagcgactgcttatcacttctgcccaaggggacacaggaggtccttcttctgcctcaactaacggaatcaggattttattgcttaaaagaccttggggagcatgcaattcaaccccatgttcttacagaagaggaaacatgctcactgcagtaaaaagtattgcttaaagttaggtagctcctggtagcctggaggaaggagacccctgcctgccccgctccactgggtgaaggcctggcgtacgtcccagccagcatgtgagcactgtcctcactggacacaggggcagcatggactgtggcacagaagacaaacgctggggaggaaaagggggaagcaagcaacctgggctgaaggagatttaatgagaggggccatgaatggaaaccactgtcccagtcgttaaagtggagcactgtgttcagaagccaggatagcgcagaacactttcaaagaatacaattttgtacccctggctatgattttctctctagagtaatgaccccggagtttagagattcttttcttcctttctgattgtagtcattgtgtgcaaacattttcagaaggctctcctgcagaatttagtcttgcacccgctcctgtttatcatttgtgagttcatgtcttagtgatctggattctgcgtgctggtcagagtagtttttcttctctatgtaggtgaactggaaaataggccataggatcgcggattgtggggagatgtgggagcaaaggtaggctcggtcttcctagcccttttgcaaatcagacagctgaatggtgaggtcacaattcttgccgcttggcctcaaattccttcctcccccacctcttctcctggcccactcctttcccatcactacttctcagtcttctttgtgccaggtgtttggaatgtgaagaggcaggctctgccctccaggaagtgagagcccagtggggagatgccctgtggtgatggcagcaaggggccaccagagggtgaccagtcccacctcttgtgtgctgggggacctgtgcatgctgggggaactggaaacagcctgggaggttttcacagaggaggggctaagccttacaggggacccgggagcctccaggtgcttgggcaggaggatacaggccaagggatggccctgtagggtggcagctggggtaccctcagggatgccagtgggctggcgcacagagctgcagtgccacactgatgaggcctgcgggcagggacatgggggcctggggagccaagagaccatggacaggactttcacacagcacatgtttagggcctctagatttaagaggtcatgtggaggatgcaatagcaacatggctggaatggacaacgtggctagaatggggcaaaaggatactgctatccagccctgcagagggacagatctggcctggaggagggagaactgagacctcaggacctctcagctgctgagaataaaaagaagggagctgcatcatcctagccctctgcctgggcgactggtggagaaattagccaggagagaagtcaggtggtgggcagggagagaagaggccacctgcattctcggcctgttgagtgctggggacatgcagggctcaggaaaagacttggtttggagctttgctggaaatacagatgcgaacgcccaccccacagcagcagccaagggtgcccaaggaccactggaggatatgtaggatgagagtagaaccatggtgaggacctcggtagggttactgttgttctggggaaggagggagagaggatgcaccatgatgtggtccacagtgggaagacctggaggagacagacagagaaatcaggaaatgtgaaagaagtgtttggtggcagcagatgctcaagacagtccaccaggtggggactgcaggaggccgctggtggagttgcatgactcatggccgattcatcagggacgatgtgatgaggacatcgctcatcccccgggaggggcccgcagctgggtctgtgatgtggtgggtgagtgaagtcagcatctctgtaaccccttggtgtgacttttagaagctctgatatactttcttattaaaacattttatccattcattcttgaaaaaatagttcctgatgtagataaaaagaagagagcttgttttattaaccatgactgcagttatgcaccagagaggacactctgaagggcaaaatctcatatcagcatcggcgtgacgtcattaggatgctctcaacacaagctggagattgccgaatggagctcttgtatctactaccctggctctgcagcagaggagaatgaatgtagggaggaaaagcaaaatgattcacagggaaaatgttacaaagaatgtctctgtgaaaggaaaataaatcctggggcccccacatcactaagctaaagggaaaagtcaagctgggagctgctgagggcaaatctgcctcccattctattcaaagtcacccctctgctcactgagataaatgcagatctgattgcctcctttggagaggctagtcagaaactcagaagaatgcgaccatttgtctctcatctacctatgacccggaagccccttccccgctgaagactggaaagtcttcccacctttgcttcgagttgtccaacctttccggactgaaccaatgttcatcatacatatgttgattgatgtcttatgtctccctagaatgtacaaaaccaaacggtcccctgaccaccttgggcacatgctgtcaggacctcctgaggctgtcacaggtgcatgccctcaaccttggcataaactttttaaattaactgagacctgtctgagattttgggggttcacatctccattgcccacctctcccccgttacagcctccaatagctacagccagtgtgagcaccaaagagtttcagggagttgatgaaagcaaacctggaatctattcactcagcacaaagaccccaaaggaagaaaggacacagtggagtcagaaagatttctctcaaagtaaaagcaaaggcctaggcagaagacacagggctcacgaatgcaggcaggctctgcaggaagccaggggtgggggaggcaggagtgactgcacacagtgggaggggtggggacactgccccttctaggatgattaaacaacaagcctctctctctctgagctgcctgctggcatcaaacaaagttaaactcaacaaggaaaacttctctgtcacacatcacacagccaacggggctgccattgaggacccgtgggctctgccacgccctagactcagaatgcttccacaaggagaaatcctcatgagatgcatgtggccaggcttcctacactgtgccctttatctcagcagagcaggcccaggctcggcagggcccacgggagagcaggccatccgtcattccaatgtgcctcctcttctgggtgaagtccctgttccatctgccaggccctgcatgatctgaagctgagacctggtgaagcagcatggcagagaaaaggggggttcctactccatcttgccatctccttgcaaagcttgatctttgactctgggtaagagcatctaaaaatcctctaaataggactgatgttattgaattcacatccatttggaatgaagaacattgtttagccacatgtctgactttatagcattggtaaggaaaacttggtaagtctggtgaaaaattagagaaagatagatgtcttatattcaaattttgaagggactacctagttacagtaaaaaaaaaaataggtctcctccctatatcttacactaaaataaatcccagatctattaaagaattacttaaaaaacaaaacaaaacaaaacaaaaaaacacaaagctggccaggcacagtggctcatacctgtaatcccaacattttgggaggctgaggtgggtggatcacttgagccgaagagttggagacaagcctaagtgttgggaacaggcccccaaatctggccataaactggccccaaaactggccataaacaaaatctctgcagcactgtgacatgcttgtgatggccttgacagcatggcccacccagggcggaaaaccacttaaggcgttcttttgttttgtttttttttttttttttttttttttttttttgagacggagtctcgctctgtcgcccaggccggactgcggactgcagtggcgcaatctcggctcactgcaagctcctcttcccgggttcacgccattctcctgcctcagcctcccgagtagctgggactacaggcgcccgccaccgcgcccggctaattttttgtatttttagtagagacggggtttcaccttgttagccaggatggtctcgatctcctgacctcatgatccacccgcctcggcctcccaaagtgctgggattacaggcgtgagccaccgcgcccggcccacttaaggcattcttaaaccacaaacaacagcatgagcgatctgtgccttaaggacctgttcctgctgcagataactagccagtgccatccttttatttgggcccatccctttatttcccgtaaggaatacttttagtaaatcttatgactgacttgctgtcagtaaatatgtgggtaaatctctgttcgaggctcttagctctgaggctgtgagacccctgatttcccactccacacgctatatttctgtgtgtgtgtctttaattcctctagcgctgctgggttagggtctccaccactgagctggtcttggcacctgagcaacatggtaaaaccctgtctctactaaaaatacaaaaaattagccaggaatggtggtgtgcacctgcagccctagctacttgggaggctgagatgggagaatctcttgagcctgggaagttgaggctgggtgacaggagtaaaacactgcctcaaaaaaaaaaaaaaaaaaaaagcaataacaaattataataaagttgaacacttatctggtgtctggaaggggaatcttttttgttttttaaatataaactatggaagaaataacacagtaaacatagttacaaaatatttacaaattggccattcaaaaagattataaaattaaaaggcaaacaaaaaaatatgattatcttaaacaagcagaaaaaaggtcaaaagccaaaataaatacaatacccaaatactatcattatgcttataataataaacagagaatccagccatgacagtgaatgcaacatattccagattaaacccatcagtgcagggaagacgtttttataagaatgttctgtatggttgactccccaggcacaatgtggcctaacacaagtatatgttgagtttagggtggcagaaaacaggaaaaggatgtgttcattccagggcagggctatattactgctgacaacactgtgtaactgaccatgcctagtttccatatatgaatgcaaggacaaactaaacaagatgtcaagggacaaggacagtcattacaccaagcaatgccctcagcatatgaaatactaggactggaaatggctcttcaagagggactagggaagatgttcaggtctgtgcaaattctagctttgctgggcagagctgcaatccactgacctcaccattgcccaccctaggtggtgtcagtcattcatggcccatatccagggatggaatgagagagctgcaaccatggatctgccaactgacagccatggagtgattcttccactaagaaacagacagtgaaagcaaatgtttcattttctgatgctgagtacgttcaagccgcctctttgacagccagggagtccaaggagttttcatttctaagatctagatgtataaaaaagaaaaccaagtgaagaggtttcttcagaaatgtcagcaacaatttcctgttgggtagttctagactactggagactctggagccaggccatttggcccaggctatagcgtctctgtgatgtttattctctggtacttaacaggttagtctggagttgactggggattgctactatagatgtgaaaagaataaatgttctcggctatcttgagattcgctaataaatggtaggcactggggataagttaaaatttcattgtccttcaaattagccctctatttgtggccaacctgccgcgtttcgggtttggatgatgtagtttccgtggtttactttgctctgttcagcaacctgtgcctactggtaccagctctaactgccatgtgctcttcacctgtcatggccccaagacaatccctggggctgagatggttgtggaggcaccaacaggttcaccccactgtgaagggcacactggtttccttcccaggaaaacacgggaggaagcactttgtgagattatcctggcaggcataggatatatgatatgcaactagagctactttctggaacccctcttcaaggtgcctcttttcaggcagcaatgcaggcattgctttgtgtttctgatttttaaatgatctccaccaatagacattatatgtatattacattatgtagtatattgtggtggttagttttacatgtcaacttgactgggctaagagatgcccagagagctggtgaaccatgatttctgggtgtgtgtgtgagggcgtttctggaagatatcaacatttgaattggtggactgagtaaagatcaccctcccctatatgggcaggcaccatccagcccactgagggccagaatagaacaaaaaagcagtgggagaggaatctgctccctgttgaactgggacatgcatgttttccagccctcggacatcagtgcctggttcttggactgagacttaaaccattgcactcctctccccacaccaagttctcaggacttcgaattcagactgaaacttataccaccagctctcctggttctcaggactttgaatttggactggaacttataccaccagctctcctggttctcgggacttcgaattcagactggaacttataccaccagctctcctggttcttgggactttgaattcggactggaacttatgccaccagctctcctggttctcaggcctttggatttgaactgaatgacaccccagccttcctggttctccagcttgcagacagaagctcctggagcttctcagccttcatacccatgtgagctgattcctgtaacaaatctccctctaagaaatgtatatccatcccgttggttgtgttactctggaaaatcctgaataatacagaatttggtacccaaaagtgggatgcccctataataaaacctaagaatgtagaagtagctttggaaatgggtaatgggtagaggttggaagagttctgagatacagctagaaaaggcctatcttgccatgaacagacctttcaatgtgattctggtgaggactcagaaagaaaaggagagctgtagagaaggcctacatcttcttagggaataactaaggaatcctgaatgctgataggaagtcagtatggaccagccatctccacagaagccggcagcgattctccaaggcaacagaaacatgaccctgcagccaactcagagagcatcagggctgcccacccatgtcaggccaggcacaagagccccagggtagaatgatttaaaagtaggggccactggtgcctgggactgcaagggcactgcctcacatcatgggctgcccaccctccagcactgctgtccctggctgtcccgggtgcagctctgccttgggcagaccctggtgccctgtgagccccagcagttgccttctggagggagcaggtggcaaaggctggcagtgactgtgtggttctcttttccccaccatggggagtgcaggagccttgggggtgtggctgcccttacctaaatttcaaaggctggggtccaggcacagaaccactgtagggccatccaactacactggattgggtcacccaaagctgtgggaggccacccaaagctgtggggccagggacttggagagccaacccctgccctgcaaagctccggggcagaaccgccaactcgttatgtccaaaaggcaggacccctgctccagtgggtctggagggcacagcatctagtcaaagaggattattctggagtcttgaggttccatgttattttctctgttgggttttagacttacttgggacctgttactccttttctttcctatttctcctttcggaaagaaaatgtctgtcctatgctggtcccaccacgggatttctgaggcacagagctcgtgtgttttcataggctcacagctggagggtgactgtggtcaggatgaatcataccttggatctcactaatacagagagatcgcagagatactgacattggggatcagaggaaaccatatgatttggatgagatgttgggctttagacttgagttgatgtgggaatgaagcggaggctatggagatgggatgaatgtgggaaagatatgaattttagggactggggtggaacgccatagactgtgtatgttccccccactaaattcatatgttgaaacctaacccccagtgtgatggttttaggtggggcctccgggaggtgattaggtcagaagggtggagccctcatgcatgagattagtgcccttagaaatgagaccccagagagctcattcatgccttccatcaagtgaggacacagccagaagatggctatgaaccagacagcagccctccccaggcacaaaatctgacacagcctggatcttggacttgtggcagaactgtgagaaaaaaatttctgttgtttagaagccacacaatctatgatgttctgtgatatctgcctgaatgaactaagacacgtatcgtatcatattatagcatactgttctgttctgttctatctaggtgataatacaaaagaaaattaaggttaagataaaattaaattaaatgcaattctgtcagctgctgtgaagatgagcaatggctgtgtaaatgcacctaaggaaaccactgtgttggggacgtagtggatgccgcactgaccgtgcagtgccaatagctctgctgccacaaacccacgggaccttggcttctgcacacacctctgtggggggctgagcatacgcagacggccttggtgacctgaaggcctggcagtcagaggctcgatgatgctttgtggttgatgcagcgcaactggagggattttgaagactgagccgacagacacactttcgcctgagacttaccagcactggagagtgcgggctgtgctagctcggtctcccccactgcgcggccattgcctgagacttcctttctttacccccataaaggctattgagcctgaaattatatcccgagcagtctcccagatgcagaataaaagtccttcttcccacagtatcttttagctttcaaaggtttaattcatagtaaaaaacggacttccacgagccatcgtgtggctaaacttttgggggcaaactttttacagtgaattactccacacataaaggaagagaagaaaaccataaataataagaagcaaagttaaccacactgattaccagaatgggcatgactccccaacaggtgtctttttattcttctatactcaagtattttttaaaagactgatatggttacttaactgacttccttaatagagaatctttgtcagaaaaatcttaagcccattactcttaactacttacactgcagaggtattaaagatgacaagtaatgaaaaaaatctatttcctcctttttgaatatctgtaattcaagaaatgcaactctggtaataaacacatagaggactccaccatacagaggcgggtgtatctgtaataaatcagatgcctgttaggtaagggtgatgtttatctgaaatgcaagagacagagtgagatcgtaccttacaaagggcttgagaaagacagaagtcaaagatggcttaaggaggagacattttcattttgtttgtcatcttatgcaattaaatgggaaatgaatcccttgaagagtaaacaccttaagtaccatgagcagggatgtagcttcttgctgaagaaatgcagggagtctgtcatctggtgaggatgcagctggcccagggaggcctggggaccccaggagttatcttgggataagcataggattctgaccttcaccacctccaaacaatacgcttttgagtaactttgctgccttgtgccttagtttcatcattcgtaaataaagatgatgatttataaaaatataataataataataacagtcctcccctcttaagagagggcaaaattgtgcttagaattttccttacttttttctcccctgggaatctgaaatcatccaaatgggaatcaaatgacataaatgaattagcatattatggaaatacaatctgttcaagctaccagattgatcggagctgagtttctgagtgactcagtgccttctaacgaagcatctcagcataagagaggaaaacaaataaagaggtgctgaaaataacattctggggtttgcagccaggcgggctaactccgaggaggttctatttcaagatgctgtcattgatacctgtctatgcgggtcactacacacagctctgcattcccagtgcctctgcagtgatcccatcttacaggacgtgctccactgcttacaggaaggacagagggggctttgacatgttggcaagctcggactgtgctgcctaggcccattccagcatctcctgactgccgtgggtgccatgagagtgacccaccacacagctgccaaaaacacacaccagcataaccatcagtgacttgacttgcttcaacagagagattctgctggaatgattttattttctcctttacaaacaactgaacacagcttatttccttccaggaagggaatgcatatctcctctaggctgagaaagttgacttgcagggaaaatgcttgaaaactagttaggcatgaaaacccaggtgcagtcctatcagaaaaatcatcattaccaagaaatatttcacgtaagcagctcattcgacactgcggagagcgcctaccgagacgaaggaattccacactgcaagccctcctgcagaagggcgcacctgtgttctccgtgcaggcaccggccatctttagtcatgaacatgatcacaggcctttcatattgtaactggaggtattacagctgaaccaagacatcattctttctaaccaggtggcatctaacttcctccccacatccctattcagcagaactaaataaaacctcaaccaggaaagtcctaacacagctccaaagccaagcagtctttgtggagaaaagggctgaaggtgaacacagcttacactttccaagcctttgcttgagccggcagcactctgcacactctaacaagggagagcctcacgtcggcaatgatgtggggtagttatctgttaatacaacctatcccactttcagcagggggacactgaggccaggagaggcaccccaagatgacacagctcgtggggttagagctggactcagctccagggtctggacttggtgttcctggcccctgtatcagggattctccatgttggcagtgccctagagacaccggcggaggtagctttcatcaattctcgcgctcagaccaaccaacttagagtctcccagaggggtccgaggcatcagcatcttgtgaaagtcccccaggccattccagcttgcagctgaggatgagaactactgctccatacaatacagcccatctcttaaggtgcatgaccaaccctgtttgatgaagatgaggcttggttcattcttggtctcacggttgggaacacgtttctttgcaacacattcttttaaatcaagttcccttacaatacaaagtggggatattaccctttggaattcattttatgtggaatgcattatatagaacggttacctgtaataactccatgttgagtcatgaatatggaagctttgtcaagttaaaggagtcgagcacatttaaggcatccttaagtactggggcgacaggcagcaccgccgggtcagagggagaggagcaaggttgcaagcgcaccccagcagtgtggccccctcagcagctgagcagatgacctccctcggaagtgacccaccccctctctaaaggaaggagacgggtgcccaacgctccaaacttgtttggagatcaaatggagccgtcggaagccattatcctccgaggtgagctggaaggaatcccactgacaaccctcacttccaggcacaggacaatcagccacggtttggagaaacaagctggagtttcaaaatgacttctgcaggtctcccgcctcctttcatttttctttttcaaaacatttgactattcacatgcctggcatcttccctggacggccgcctgggctttcggggttttgctgtcagcaggtggagagcatccctgcggctgttaccatgcgttccttctttctccttgacattcttcaggatgattaatgatctcacaaatcagggatattatgagggtggagaacgggttaggagatacttgaacaacttgggctaatggaacgcagaggtgttagagctgagacaaacttggaggtccctttgagtcaactctcttctttcacagatgaggaagaaacaagaaactaaggttttgggccagcaggtgtccttgcccaggctaagtgctagttagtaccagttagtgctagttagtgccaggcctcctctccacataactccgctgcatcatggttagatccagggacctaacctacttcgaagtatgcaaagtattatttgcaaagcttttctatttttctcttcagaaaatagattccaatgaaatttttgggaaaaaaaaatctactttttagtgatggatcattacggaaagccgaaacagtataagatgtaaaacaatgattagttttaaagctgacttttaaggaacacaaggaaacaaaaatgtttctattcttctatgtttatatggctttttttttttttttttttttttggacagggtcttgctctgtcacccaggctggagtgcagtggcacaatcacagctcactgaagccttgagatcttgggcttaagcaatcctcccacctcagcctcccaagtagctgggaatacaggtgtgcgccaccatacccagttaatttttgactttttaaatttttcgtagagatggggtcttaacatgttgcctaagtctcgaactcctgggctcaagcaatcttcccacctctgccccctaaagtgctgggattacaggtgtgactaccacatccagccacatggctcattttcatagcataaaaataattttagctactcaagcacattgttccaaaatattttaaaaataactttacattacaaaaaaattagagatatttcatttctgttgaaaacttgcagtaacagagtatagggaagaagacaacagctagccccaatcctgtaagtcagcccttcactttggcatgtttgcttctggcacaatgtccatctcatgtgtgtacacacaaatacacacacctcactactgctcaagtcactcttaaatttaacaataccatgattattctgtacacagagttttatgtccagcctattccacataaccatggatcaggagccgtttctcaaggacactgtggactggattataaacagccgtggatacttgcattagggagagtgaagtcatcgagatggagcgttctgcactttagctaagaggccaaggtcagccctgagggagtccaggcttagcgacaacttaaacagggtgcagcttcccgctcctccattccactgtattcctacagagcagagcaggcaggcacagattccagctgcattcccactttgcctccctttccttcagtggcgggggagggtgaggccaactttgaagggaaagaaggaaccgttacgcttgaaggagaaaaggagctcttccgggtcactcctggtgccctggagaggtgaacatggaaccgcctgatggacagtaggacagtgtgtggccaaggacaggctggagagcttcccgcatccacttgcctttgtcttaaaccacaggaagatgcctcatctgtgtttgagagcaaatctcaatgcctcgaggatgaaagagtgggttttaggaaaggaacgtattatctagcagctgttcattttaagaataacagctttttggagatataattcacattccatatgatttgcccatttaaagtgtacaattcaatggtttttaggatattcacagagttgtgtaccatcggtgggttttaaagattttaatcacccaaaagcagctccagacctgtctgcactcagttcccacctctctcaccccccagcctaggaaaccactcatctacttcctgtctctagggtctgcctctcctggacggtcatatgagtagaatcttaacccgtgcggcttggtgcctggctgttcccgctaagtacactcttcccaggcttcacccatgttggagtgggcaccagtactttattcctttctattgcccaatatcattccgttgaatagatagacactttatttttccatttcccagatagtggacatttgagctctttcccttttttggctactgtgaattggctggtgctgccatgaacattcctgtgctagtttctgtgtagacagctgtgttcatttctcttggtgaaccgcctaggagtggaccagtgaggtcgcatggtaatctctggtcaacctttcgagaaactgcaagaacagttcactgtgttggcattcagatgatcctgcactaacaaatgtctaatttaacttcctattttgaagagatagctgtaactgaagagacatagaccaatggaacagaacagagccctcagaaataataccacacatctacaaccatctgatctttgacaaacctgacaaaaacaagaaatggggaaaggattccctatttaataaatggtgctgggaaaactggctagccatatatagaaagctgaaactggatcccttccttacaccttatacaaaaattaattcaagatggattaaagacttaaatgttagacctaaaaccataaaaaccctagaagaaaacctaggcaataccattcaggacataggcatgggcaagaacttcatgtctaaaacaccaaaagcaatggcaacaaaagccaaaattaacaaatgggatctaattaaactaaagagcttccacacagcaaaagaaactaccatcagagtcaacaggcaacctacagaatgggagaaaagttttgcaatctccccatctgacaaagggctaatatccagaatctacaaagaacttaaacaaatttacaagaaaaaaatcaaacaaccccatcaaaaagtgggcaaaggatatgaacagacacctctcaaaagaatacatttatgcagccaaaagacacatgaaaaaatgctcatcatcactggccatcagagaaatgcaaatcaaaaccacaatgagataccatctcacagcagttagaatggtgatcattaaaaagtcaggaaacaacaggtgctggagaggatgtggagaaataggaacacttttacactgttggtgggactgtaaactagtttaaccattgtggaagacagtgtggcgattcctcaaggatctagaactagaaataccatttgacccagccatcccattactgggtatatacccaaaggattataaatcatgctgctataaagacacatgcacatgcatgtttattgtggcactattcaccatagcaaagacttggaaccaacccaaatgtccatcaatgatagactggattaagaaaatgtggcacatatacaccatggaatactatgcagccataaaaaaggatgagttcatatggtttgtagggacatggatgaagctggaagccatcattctgagcaaactattgcaaggacagaaaaccaaacaccacatgttttcactcataggtgggaattgaacaacgagaacccttggacacaggatggggaacatcacacactggggcctgtggtggggtggagggatgggggagggatagcattaggagatgtacctaatgtaaatgatgagttactgggtgcagcacaccagcatggcacatgtatacatatgtaacaaacctgcacgttgtgcacgtgtaccctagcacttaaagcattaaaaaaaaaagttcactctaaaaagcatgggttaaattacgttacaattgataacactgaactaaaaacttgagtgcctacaataaactagaatgtctcacctaagacttttgtgtacgtaagaattactgggacatcttgtttgaaaagtcatatatctaggccttgtttctacaagatgatgattcagtagatcaggagtggggccaggatctgtgtttgtaacagtcctctccccgcccccaaacacacagacaattctaatcaggtctaaccaaagtggtcaacttctgcattttcttaccattggttgtactgataaatgtcaaccagatttctctcccctatagaattttcaccagaagtcccacggaccttctaactcacttggaagagctcttttcctcctttgtatacttaagtggtttaaagtctgtacatatttggtctatgcattttttgtccttcttgttggtgacaggtccttcccaacatatatctcatttcctcagctagaaggcaagtgacctgaaggcagagaatgatatatttgtactgctcccctgcctgtagttgctggggacactgttgcaagacctaaaaattcaagtgccgccttcacatctcagagcctcatggggccccaaggcctctgcatgagctccctgctctgccaagtgtgcccccctcccagagagaaagtctccctaccctgcaggtttccccataagctggaccagctgcccccatccagcacccaccctaaaaggcttcagttccctgccagcccacagaatcattccaacaagccagccacaccttctgcaggaaccaggggccacgtgaccctcccgttcctaggaagcctgcctctcaccgtctcggcacctaagtgctgcccccgtgacgccctgtgtggcacggggtgccctcctccccagggggtcagtttatgtaactaataagctgctgtcagttcatctgtccagtgcccggcgctgtgtgttcaatcgcctaatgctgtttagggcagggggaagttccctctctcaccaacacagtgaataggaggtgatcagaacagatacggtaggtgcccagctagtgacgggcttaaagactgtgagcctggaacggagattttggatcacattctgactctaacgctgcactaggggctcatccctcacttgcaggatgggcgtgcagaggagctgggcagaaatcggtatttctaatgcccagtcactgggtcaacaaaggaaaacaacccaacccaaccatgagtcacgttgtatttaaaaccgagtgaggccgtcggcctgccggtatcgaggctggtttgtcaggccccatccagcccaacagcctgctcgcagcctgctgctctgctttcccaatgccgctccacggcagaacatatgtgggagaatggtatttacgcaatacagctcttctctgacaattgtggaaactctgcagggatattttaaatattcatggaaatgtttatactgtttattatcaatcagagagtaatgtgctcatttagagacattttcagaaatcgtgaacattaaatggaatgaatatttcctcaaataacggagtagaaattgcagttacctgtctctgaagcagccggcccttccgaagctcttaccttttagggtggctttcttaaggaccttcatggcgtagagctgcccagcgtcggaccccttcaccttcctcaccaggaacaccttagcaagagaaaacggaacatcagaaacccgtaagacttcaaactcgctttccatattggatttgacaaggggatacacaaggaagtttagagcattttcaataaaacaagtacactggtgagaatttaaaattttctccaacgtcaaggctgccggaaaatgctctaagttcctatagctctgcggcgaacatcactatgtgcctgtatgaagaagcgtcatttgtttttggtatcattaactttgcattttatgccagaaataataccgccccttgttttgaagaccagctgtttagaaaaacaaacaggagttttaagggagatcctttggtttgagtatccctctgtaaatccttactgagagaccacgctgaaaggtattaccaatcacacaaaacaggctctatccgattttcaagaaaagctactttctcttacttcaactgtcttcacccaaattttagctgtgagtagcttaagagttcctttctaactggatcttaaatacacttacggatatttggcaatgctttctgaaatacattttgatgtgtatcactgagaaaaacaacaaaaaaaggtaattgagagcttgagtttaaatttgtattagtgattttttaacaaacttagtaaacaaaactggagttcctttgtataaaaaaaaaaacttccatgcaaattaagaaaatagtacttgattttcctaaaagtgttttccaatagatgcaaatatctgcttgcatgatggagatgacacaggcacacggtgcactggtgtggctgcccatgcagtatggctggagggccgaggtagggtggctccttcccaaaacgtctcctttactaagcctcaaaaagccagaaagaccagccactatagatgttctagttccatggaaactccaggtggcccaagtgagcatccgtgtggagcagcagcctcacctgccatgggcagagggacatggctgggacctttgcactcttggctcccccccaagactggaggggcaacgtctagacacttaccgagtgcaggggctctaggagcaggggctgctagggcagcccaactggagggagaccaaccagcgtctattctagaggcacaaataaagagggaccgggaagacgcaaggtcccagcacaggcatgtggattcacggagttgctgtatcagtgtcacgctctcaccatgtgcccctgaagtgattccggaccccactgctgccctgccatctgtcccgatcactgtcattattgaatcacagcccctccccaggtggggactcttctagatgacgcccatgggaaagcaccccagcacccctacccggggtgcaggacggtacagcatcatcctgtgtgatgaaatgctgcctctcggacccgattaggtcccaagaagtcacaggcaattagaaagaggcttccctcttcccctgggttatagactataccatcaccgacagttaatattcatctctgggagatgtgtggagtgtgagagagagagagagagagtgtgtgtgtgtgtgtgtgtgtccccaaagctggataaacaagcttgtggtgaagccctggggcgatagctggggcatcacccttacgcacactgtggtgggagacacaggcacaagcccttctccgggctcaggatcccatggctcttgctggcagacccactgtagccctggaagttactgcacatggaaggactctgcctcagggtgttccctctgtgcagtgggcgagcttcctgacaggcaggtagagatgtgaaggcagtggtctgaggacaggatttttacagagagaaaaacattagtgcttaactcttgagatcttctgctttgaatcacgggaaagtcacatgccatgcacagttttagcttccatctgatgcaactcctttcatttctccagcccgtccgtgtgcctaatgtccctaggttgacttgatgagtggtgctgtggagatcaggaccagccaggacagtgcagggaggaggcaggcgcagcccaggagtccaggagctgggcaaggctgcgtgagcgtcccggtgccggagaggccgcactggcagagaggaacctgggtcccaaaaaagtcggagggggtgtggaacaagggacagttgtgtttgtggcagggacgccacatttccccggcatcctgcaggtaagttgggcagtgacaccagcaagggcaggggtgtgccttcctggcctaggcaatgaagagcaggtgcaaaacgttccagctgccactccctgctgtggcaactgaggacacctggtgcaggacaaaccgggcagcctggtcactgagtcactgtgtggaggatggaagccttgggtggttgctccagcccatggtggactttggtagggtgacagatgaatctatccattccattgcggcgaagctgacatgttagctcccaaaataaggcattcttataatcagaaaacaaagggccaggttcagtggctcacacctgtaatccagcacattgggaggctgagacagaaggatctcttgaggccaagaatttgcaaccagcctgggcagcatagcaaaaccccaggtctagtaaaaataaaaataaaaattagggctgggtgcggtggctcacgcctgtaatcccagcactttgggaggccgaggcgggcggatcacgaggtcaggagattgagaccattctggttaacatggtgaaactccgtctctactaaaaatacaaaaaattagccaggcgctgtggcaggcgcctgtagtctcagctactcgagaggctgaggcaggagaatggtgtgaacccgggaggcggagcttgcagtgagccgagattcagccactgcagtccggcctgggcgaaacagcgagactctgtctcaaaaaaaaaaaaaaaaaaaaaaaaagaaagaaaaaacaaaaattagttgagtgtggtggttggtggtgcgtgcctgtaggcccagctatccgggaggctgaggcaggaggatcgcttgagcccaggagtttgcaaacaacaagctccctctttcaaaatgggaggaccctgaagaaaaaggaagcaaggtacatgacggatttgtgtttggacggtgcagccttcacaatatcctgagtgggtccgtactttcaatacctctgcactcaacccctaacccataagaagtacgaccgtataaactcaaagagcagaggaagccccattccactcaagtctgaactggagaccaagtccacatggggcagctgccagttaagatttggtttaaatgatgtcaagttttgcataggtcttgacacatgaaacttttctctctcgtatgttaggccttaaagatgagatgactgatggtcgtggctaatgttcatacttatctgttttgaagagagaaccatacttttgctttttaaaagaatggaaaaaactccatcctaccaatgtctgccaagcttctctgtggggccaggtactgcgaattcctgcagcaggtgctgcctgactcgcaagcacaggacccagtggaggggaacggcaccttgagacgagcagcaaaatacagcaaaaatgcaaaaatgattttggtaacgagtgtggcaacttgctggtctgcgacagggatcttgacccttgggtgccgtgcagttccctctccctctctgctgtcattcttgtcactgaagatcaattttaatgtagtggaataagctccaaaacaacactgtaacctcgagctaacgcaggcactgtgtctttaatactcaacccagtgggcgctgtgtgtgccccctcatttcatttttagaactgcctctccagcagcttggcgtgctgcattgcaaagatgctgtgagaaccgcgacctggcaacaggtgcgatgtcactctgaactgcctcatgatgtcatggatcaccgtgatctgctgattctctcagcagaattctcagctctctctcagaactggagggtttctattgggctgcaaaatccttcaagcaggagctaaatgcccatgtgcacttccagggacttttgagtaacagccacccccaaaaggaagacatttaaagacatgttcttatcatgctaccagcaaagtcagagaaagcaaggatttttaaaaaactttggtttggttcctttttcgaatgcaggaatcataacctacagttcattctccagaatattttaaaggaaaagaggtttcctatcctactcctggcacttatgcgaataggggagctccaggagcaggtgaggaggtgggaccagggcaaagccactttcccagccccggggtggttcccacacctccctcctctaagctcgcagggaacactgggtctgcacccctcctttcaacactgaacaagcttcaccatctttcattgctttcctgattcaagctttaaattgcttttcattttgaggataaggctgttttctgtgcttttctctggtcccaagcaccacccatggccctgctctctagatagcgatgaaatcatgatggcttcgccttgcaggactgagctcagagctcatagacgcttcccgctggtggtgagtgcagcttctcccacaggaacaagcttattccggctgaccaggtgaagagcagcggcttcggagagcctaagcggctcacacaggcaggcaatgggacaagtcactcggatggctcctggtgcagtctgaggtcaggagctggcaccagtgcaaaaagtctaaagggaagaaactgcatgtcatccatttctgcatctccaatgtcatcattaaataagagagaaagaatggagtggctcagtgacaggcaactatgagccctgttgaaggactcggctcccaggcaaggcctgtcccgggacactgcgtccagattcacaccaggtctttgctctttggagcggaggcaggaggtggaaacctgaagaacaggtgctttctgcagaatgagaacattcagtgttgtccttctgtccctggtaggtgcaaaagggaagatgactcttgcataaggttgtgttatttgcatgtagagaggaggaatacagtaacgtggggcattagaacacacggcttctccccctcgtcatcagttttgcttaaattaaaaaaactcaccacaaacaaacctatgtggacaaatacaatttgtatctgtgactctctagtgacgatattagctccaaccttccctggaaatgtctgagcaacgcttttgagaatagtatctcttctttccagagtccagctcgcattaatccacgaagcggacctaagcctcccttcccacgccagccccagcctggacctcctgccccgcccctcacaccagctctggacaggcattactggagctggcccattccgtaatccctggaggtcagacacccatgggcgctgccactgcctcatccttctctttcccctacctactactgttcttgaaactttacgttttaattcctcatataataaagacacaagtaaagataaaattagaagtggtgaaaggctgggaaggaaagggacagagtgttatgagcattatcattccaacgggattctgccaaacaccatgatttcacttgttttccaaaacatgtttttttaaagcaaaattaaaattcaaaatttgaaatctgaacgagggagctggaaaagcctttctcctttcatctttaataccccagttctgtgaggaggacattggtaagattcactctgtaacagaattggtcaaccaaagccctccagacacttcctgggcctccgccatgggatgtattccagcgctccttccctccagataaagacgattcggctgattctgtgcttccacaggtggaatctgttctcaagaaacaatgcatgggcaacacccttgaaaggtggaaaaaggaaagaatgcttgcttgtctctgttttcaaatcatggagaaaattattctcctctctcttttttctctacatttctaattaatagtgaggcattccactgtcacattacgcaggctctgccttctgtgattttgtgctttttggtaatggctattaacatcgtgagaaactgaaatcttcatccccctatttcataaacaccatatcaactagccatattaaatagacatttttgtaggcccaaaatattgctggtaatttcctatggtttaatctaacgtataaaaattttacaaacaatccagttcatgcggactgtaggattatccagaacaccgatgtactattcattccatccagttcatgcggactgtaggattatccagaacactaatgtactattcattctacacttaaattaacagcagccacatgcattttggcacaaagtcatgtgaagaatgcaaagatttggtaaatgtctacataccacacaaaaatagttactttaaagagccaggctgttctgcttacatgtaaggaacggttggcttcatggtttatttcaggcccttatgttctagaaatcaagttgtcagagcctatatatttctaacagctaacccaaggaggcagagaaatcagcattgtgctggagtaagtcacgtgtcatcataattgaaaagcgttattgacatcttgttgtatgtggacgtggcattaaatgaagagccaactatttctcatttcctgaaagaaattagcttttattgctgcaatttgaaggtgacaaaaaagggaaatgaacaattccactgcacaaatacatcttaggcacctgctgggtgggattcgtgccctatttactccatggaacaactgtataaagtaggttttatcctttccatttagtgggtggggaagctgaggcttcatgaggcaatcgtgcagggtgaggaggggagccggctgcagaccctagccttcctggctcctgtgcccaatccagaggaatggattcttttcttttctttattctttttttccttgttctcttatttttttctttctttggggaaaacagctgctagaatgcactttcaaagatacattggctcaggtcaataaccttcctcaccttggtgatgatttaccaagagccaagggaggctctagagagaaggcaaaagtgcatgtgacggctccaacggcattttgttctcacctggcacagcccagccctgtgccactggaattctggctgtgcaaagtgagaccccggttctgaactgtccaggttcccgtgatcgcagccctgcaggtgaggaccgcctgcaattttcatccaggggggctctgtccaggtgtcctttgtgttcaggaatgagactcaagagacagccagggctgaacttacctttccataggatccttgtcctaaaaccttcagcagctcaaactgggaaggatctgccttctcaaagccctccttcacatgatggctgatgtctatctccttcacgacgccttcttcctgcaagagagcggcacgggtgagaaacacaccgcgaggagtccctcagagccgctcacagcttcctcctcccctgagtttaccacgagctgggtctgttacagattttagcgctggagtttgaaagtggagacaccatttagttgtgtttttttcttttttttttcttaagacggagtctcactctgtctcccaggctggagtgcagtggctggatctcggctcactgcaacctccacctcccaggttcaagtgattctcttgcctcagcctcctgccaccatgcccacctaatttttgtatttttgtatttttaatagagacgagatttcaccatgttggccaggatggtctcgatctcctgacctcgcgatccacctgcctcggcctcccaaagtgctggggttacaggcgtgagccaccccgcccggcccatttagttttatggaatcaacttggtgatgtgtgtggttattgtgtgcaccctgtgggccttcatggtttcttttctccatggacttttgtcatttggtcttaccaaggcctccgaaaaatctaagggtactctcaatgaaatccattctgctctttaacagtctgggcagaagttctggtacgatgaatatagcaactatggaacaaaatgacagcaaaagcatattgacgggttcctagatggagaagtggtctggaaaatgcagacggcttgtcctccttctccttctgattcacgctatccctggtatgtttgtcaaagctaatgtaaagaacacgtcattgccatcctatagattatatttcagaagaagcagtcaggtaagatttgccaccagcccagaaagcaagatttccctgtaggagaaagagtctataagtgaaaacactgacagaaaacactacaaattttcatcccagagcttcctgtccccagagtcacatgacttcccttgtaaaggggtaggccatctgcccaagtgccaggccctggaaatggaacactggaaaggaggtgtttctcccaacatgagacattcgagcccaactgttccttgaatttatctctgcatttctctgagatttctgttccactatctatacattcgtacacccctttctacagttttagctcggggtgaggggctgaaaaacttcagaaactgctggctaaaatgcgcatccaaaaacagcaaccaggaattgtatgcatagtgtgctctgggaaccaggggcctctcattcctcattgcttcttttcatgaagaaactgtgaagtggagattttctcctgagactcagattacacattaatagctggaagtgatagaggtgggcttctcatcaaggactgacttcgaagccaagtacttccaccctctgttttactctaagagtgaagacttccaaatgaaatcacaatagcaataacgtacatgacgatgtttgaaaaattcagtttctcaaaacggttacttataaatcttgctattttacctccatgtcacaaatagaggcacatgtaaaagcagataaggtgtctgagccgtggaaactcacagcggattagaggcctatgcagttatccatggcttttccattctcagttaaaggaaacactttcgtctccatatcttcaaggatgatttgctatttttgtaaaaacagtggtttttttttgtttgtttgggaaaacaatgagtatagccaaaattgactctgtttaatccatcctgaagttcatatgagtgcagttggaagatacagaattacaattttgttgcttcataattacttcttgaatgagtaagtaaaaatgctagaggcacagcccagccaatgggcattatatttagatgctaatttgtgaggggacatcacattttaagcccttcctcccttcacagcacaggcttactagaattgcaggaccatgctagccacccgagactgtgcagcttttgtggtgaaatctcctggtttatggaaagggacagaaaaaaatgaggccctcagggatccacgtgtgtcactgcctgtgagaaccactaccttccacgcggctgctggaggtggcttcctgcacaaaaaacaaaggcaggagcccaagttcaaaaaaattcatcatggaaacatgtatgctatcttttcccgtcattgacctacgaaaggaagaaagaaattgcagacgatttgtcatttaaagaacaacaaaatactcctcttctgttactaaaacactgtcctcgcaatgggtccattaacatcctctacctacaggactagcacgcgcatgagtcatccaaaccccagcctccctcccaaaatagctcccatcatgcagctgtgttaatgcgacgcccacactatgaaaaaaggaatcaccaccaaagcacacccttctgtgacttcattttggtaacgagagcatggcaacggccacactgcagaacagaaagtaaaattcaacaccgcccagaggtgtggggcaggcgaggcacgagctggccagggaggcttcacactgcagccaccaccctttcctggggcacgtttcccagcccttgtgtatgtttcctaaagatttccagttccttcctttttcttcagcagctctttgtggagggtctgagacccacagctgtggtgaatgagctcatgcagtcccatgggtcctggtccccttcactgcctttgtgggacatgcctttgtgggactaggctctgaagcgagagtgacagcatccgggctacttggatgccacctggccatggacgctggcacctcagaattcccatgggtgttcccctgctcccagtcagcccgttttttaggctggcttcacgccttcctcagcacttccaaattgccatcccctgttgcctcccgcctccccggtccatgccacacccccacctccgttgcagaagttcaccttctttagtcatttctgtaacgtttcgaatcaaagccttcgacgcagatatctcataacatttcaaattttgtgcagattctttctgtcaaagtattgagagcaaatgtacctgaagtacacacataatttcatctcctaaaatgacatgaaaaacgccagctttcttccctaataatattgcgatagagttcacttctcatttcaaatcagtaaggtttttaaccgcaaagcatctgaggcgtcaatggaaaaaaatccccaagagcatcacctttcagacttcagagttctgccttcacagtgacattttagcttgaacttgctggaggatgcttaactttctttttcactttccccaaaacgaaaacaaaacaaaacaaacaaagatctggtgttccatggactcggcgcgcactctggggtctgtgtgaataggaaacagccagatgaagccccagcaccatactcccgggcactgctgataacgaccctctctggacagccctggtttctggatcccttcatgacaaccaccctaaggggcaactagcatgaaaatgttactcacatttcattttgaaatatgtgccttttctgttttatgaagcaggtaattttatctagagcttgatgaggatttgcatgcaatgccttaggaagatcaagtctgttcctgaatcggctgcatccatggcaggagcatgtggtttccagcacagctactgtaaacagtatttttaaagctaacttgagagctttgggaggaggagctgggacggtgatcaggtgctagctccataagcaacaattccaaacattttgtaacgtaagaaagaaaaactagaggtataaactgtttaaatgatgtttgaatgtgacaaattgtgacaaggaatttttaaaattcctgcagaactgcactcaaaattccaatgactgcaggaagtcccgggcaggtatttcagcagctgctgggagcggctgggaagtgggagtgacagggagaaagatgagggcggttggccactggctctgcatgcctctctctgggccaaagtcgccttcttaggtcatttcctctgctctgaatcacctgctcttcatgtcattaaagggataatatttataaaaagtgcaaattaaaagttgtggaatattaatgataaggacataggaaacaaaataggcaagggttcacctcatttccaaaaaaggagagaggtcattctataaatcgcagattcacatgtaggatattaatttccagaataataacagaatatattattacacaggtggtttatgaaaatgtggaaaagaacgtatctccaactcacaggtcccatcaagccagcactgttctgctgctgacggcatgaactcatgagcaggtggacaagagcctggctttgagggcagctttggtggagtccctcctgaatcccaggtgacaaagaggctggcatcatataaacgcttaatgacagagtaccacatcgcaagtcattctctcaaggcacagaacccggacacacctgcccaggaacagtatcgtgtcctggaggttctgaacgtatgaatgttctatgttgcccacctgcttcagaatcaccccaaggaacttgttaaaatgcagattccaggccctgggcaaggccttcttggtctggaatctctaaacttggcttcgtctagaatctgactttcattatctcaccaaaggtgcccttctcaagccatccaaatcttacccattgctaaatcgagtggctaaatttccatcctccatagcactgggcatggctattcactccctctcacttgaaacactctcttcacctggattccagtacatcctactcccctgggttcgctcccacctccccctctttctgtgtctgccaaggtcacctttcccctgggcacagtccctggccttttgtctccatgtagttacccccttggaacctcgtcctgtctccgggctttataaaccatgtgaataaacactgacaactctcaaatctcaatctccagcaggggctgctcccagaggtccagttctagaggcccatccatcacaggcaactgtcctgagtgtgtgcacgtgtgtgtgcgcatgtgtacatgtggaatgcacatacgtgagtgtgtgtgagacaggtcttgttctggctttttctcacattgggatggagctccttaaagtcccagctttatgcaggaagtggggcaagaggtctgcctggggccagccctgggatttgtcaccagttcccctgccctgtgaggctgtaaacagccaagctcaaattcaccaggttgtcacctggcctccaggagaaagctggctttaactgtctccttccttgggttccctgctctaacacagggtttggcctctgcgtattccttactccccagctcactcacacttttaaacattcttaaagggatacttgatccaggactttcggttgtatttcacatgagggctagccacatgtagtctaccacgccgctagaatggaagctcaggaatgcttttaaagggagagaagattcactaaatggctttttagcctcttccggaaaagaaagacagccgcagacttgctgagaagagtagaggggagtctgtgcaggaacagcccccggagagcgagctccatctgcggcacgactcctgatagctcgtgggtcctcggcctttggttaccaggaaagctggctgcaccagtgaacacatgccacccatgacaaaaatcctccagtaggccgtttttgtaattactaaaacgaaataaaaataactagacatttgaaccaaagactcttaagaaccagaaggaacctcccatgtagcaggttgggcatcttactattcaagggacgagaattcagatcatctgaggcccaggacccatgctcctggcaaagctgcttccattccaaccagggcctaggacgtttagagtggtaacggctcgcgaactctggggccttctctgccctttaaactgccctttctgcatctccgcaaatgtgtctgcttttgctggtgtgagcaaatgtgaaatgaaatgatgggaccagctgcatttgtccaatcaattccttaggaaaccatttctacaacaagtttcccttccatttctaaaaagctaaatataagtgagccatttagtacagcagaacgagtaccctcaagaatggaaatcaggctggtgacatgggcgcttgctggaatctaggtgaaacaaagatggcttaatttaagatgaataaatctgctacaaaatcataggaggaagggaagcaggagaaggaaagagaaaggaaaataccgggtgccatgtcaagatcgcagatagaagctctgaaatttcaggagtgtgagcctatctacttgatagagggctgctcagcgagacaaggtctccatttcaaccctggtcattttcagagtttgaactgcatctattcgatacaatgctcaaatggatgccgcagaatccgcggagggaaagcaatgtgcaggaacagggctgggctctgttttctcatccatcctagaatatcactttttctttttctgaccaatgaaagtgatttagcttccaagagtggtcactgcagtcaccgcatgcacagtgacaatctaggagtgggctggctgctcgggctcctttcctctttggggagaagtctccgttaagctactcactgaagctcctcggaactgaggctgggctaatgtaaggttcctagaacacagcagcactgagtggacagagactatgggaagaaaggaggagaagcagcaaaaccagccttggcatttctctccttttttttctctttctatccaaacttgcctttctgcctccccaccccgtccctgttcattttagtgactgaggagagaggaacctcccaaggatgtttcctctctggttttaattaagccctgccacttcgccactgtttctgccttcgccttcattgcctgttgttcccgtggattattttctcttcccttcttctcagccctcagtctgctggtatttttataaatcacagtcaaggcaaattggactctgaaagttgtgcttataaacggtgactgacagatggagcgccgccacttttgcaggggcctccttcccacagaaaagacgtgcaaagagtggagagccagggcttcctgcacacacatgggctcccagtcctgacatcggccattctgtcggtgtgctcattctgataaatcctccaatccttaacctccctgggaaacgtcagtgtgaagtcctcacggaagcctggggtgttggtgtctgacacggtgttttaggtatggctccgtgaccccttccacttcatcttgaaaattatcttcaatgatttgctttataaagactcattactagcatcggggaatgagacggtagctactgactgacatgagtgtattaagatgcacaggaacgatctccgagaagcctcacactcggggcaggtggaacacgaatgcagattaggtcaagccacagtgtttcctcgtggaacagctttagatgggaccatttccggtctgggcagtgggatgagtgcccaaaggggctgaatacatctgtattatttagcacaactttaaaataacgccaggtaaaaacccggtgacagtgataccaggacgcatgcctggtgtgcacccaatgggacattatttatgctagtgtgtcaccctgactgggaaaactttttttttttttttgtctctgagatatatagtatgaaactgcactaagagatgagagaaaactgataacacgggatttaaaatcacaagtggaaaaacctacatcatcataaactacatcatcagtataaccaagaaaactacagtcatatcccagtgagacctattgggataaatttcctatttctttagcagaaaagggaaaatagaaattctacaactatcatcttctcccagactcaattatcgatgtgtccaatgtgatctcctcattctttttcaaaagcaacatattggtgaatgtttggtcaatacctctaccagaataagttgatggctgcgatgtttccattaagaagaataaaaaatgctgagtcaactaggatgtaaagaaaacgcacatcccaagagtgcccagctgttgggaacgctgagctggtgggctcttctcacacaaagttagtttcttttcttttttttctttgagacagggtcttactttgtcacccagactggagtgcagtggcatgatcttggctcactgcagcctcgacctcctgggctcaagcgatccttccacctcagccctgcaagtagacaaaattagtttctatttcaagtgtactgagcaaaatcgcaaggctatattgatcagaccgttcagatacccagcagagggacgcttgctggggtaagagaggccggtgacgtgcgtcctcctctccagcagctgaaatgggagtgtgcacggggccaactcactctacaatgctgcaacaccaccgacttagaggaaggaaggcagtttgggctctgcaaggaaaggctgcttaagtaatggatttttaaaaaatggtccaccaaatccatggcaatcagtatcacagctgatggggtgatggggaaagtctcatccccaaaatggttctgaaaggtcggcagctgagttggcagctgagtgcccgctctccggcagtggtgctggtgcccaactggtcatgcacggtgtttgtgatctggatgagagctggcagagcaaaactgttaggctgcagatcaggatgaattattcaaattgataacatcttagcaaatggagaggatgtgctagaagatcagaagaggccattccggcaggcagagtgatggcggcagccgcttaacccatggcacgtgtgcagcacgaggtcatgttttcaaaaaaacagtaattgtgccttatatggaactttatattaattgtgatagagagtagtcagctgcaatgcaggaaaggatggaaagagtaactgagtccgtgttttagaaaaagaaataccactgtgagtggaaacgcacctgccctatggggcagactggcgggccctgaacagaaagcctgcttctattctgtacaaattccatggtcgaccaataggcataacgtgcacaccttctgacccagggacctcactcctcagaattcatcaaaaacatttacacatagaaagctgtaacattatttataacagtgaagaaataagaaacaattgaaacgtccagcaagtggggaagaataaggaaaatgatgatctatccaccaaatgaaagtttacgtaggctttcagagtgattgcgctttttcccattactccaaaaagatgaaatacttacatataaagtaacaaaacaagtatagtatctgtgtgtcaaaaattacggaacatattattggaagaaatcaaagatctaaataaatggagagacatgtcatgttgacagctcagaagagccaacatggtaaagatgttaagtgttcacaaatgcacctgtaggtataatctcccatcaaaatctgagcaagcatttttttaagtatagagaagtttattctaaaatttcatggaaaagcaaaagacctgtaatacccaattttgaaaaaacactaaagtgggaggaatcactctacagatggtaaggtttgctacatagctacagtaatcaagatggtgtgctattggtgaaggggtagacacacagatcaatggaatggaatagaggacccaggaatagaagcattcaaatacacccagctgcttttggaaaagcaattcaatagaggaaaggcagcctttttgacgaatgatgctggagcactggactttcataggcaaagaaaaaaagacatttaacctaaattccatctcttatacaataattaactgaaaatggatcacagacataaatataaaacataaactacaaaacttctagaagaaaacataggggaaaattgtccaaacttagggctagggaaaaattcttagacatgacacccaaaccatgattcatcaaagaaaaaagtgataaatcaaacttcatcaaaatttaaagcttttgctttgcaaagactctgtgaaggagatgaaaagacaagctatagagtgggagaaaatgtttaaaccacacatccaacaaaggttctgcatccataatgtataaggaattctccaaagtcaatagtaaaacaaaacaatccattagaaaatgggggagacaagcagatatttcaccactgaagatacacagatgacaaataagcacatgagaatatactcaatatcattagtcatcagagaagtggagagccgcaataaagtatcagtacatacccatcagaattgctaaaataaaaaaatagtgataaacatcaaacatcggtgaggatgcagagaaactggaccttgtacgttgctggtgtaaatataaaatgttccagccattgtagaaaacagtctggccagtgtcttacaaaacaaaacatcccagcaaacgtattccagggcatttatctcagagaaatgaaaactaagctcacacaaaaacctgtactcaaatgttcatagcagctttatttgtgatgcaaaaactcgaacagcccaaatggtcttcaatgaatgaatggttcaacaagctgcagtacatcacatcatggaatactatacacaaatgcaaaggaacaaactactgttagtcacaagttgtatggatctccagaaaattacgctcagtgaaaaaaagcaaatctcaaaggattatacaatgtatgattccatttacatattttttgaaatgcaaaattatagaggtgaacagtttagtggttgccagaggtgagggatggttggtgttgggggggtgtgtgtgtccataaaagggtaccatgggggatatctgtggcgatgggacagttctgtatcttcatcaggatggtattgccacagattacacatgtgatatatttgcagagaactcatatacacacacacgagtacacgtaaaactggtaaaatacgaataaggtctgttgattgtaccaaatgtgaaattcctcgttttcatactgccctgtggttgtacaaggtggagcccggctgaagcacaaaggacctctgccacgtgttttgcagcttcctgtgactctataatcatttaaaaattttaaaaatggtaaaaagtgatttttaagtctatttgccaatattgaaagagctttgttataagatttaaagaaagcagaaaaataaacgtcatgtatatgatgattaccgtgacatttttacaaggtaggaaaaatatttatggaaaatacgtcaagatattagaagtgatagtattagaaaatataaatgattaattttctcccctttgttttctgaatttcctatacagaaatagaaaactggccaagtttctatacaaggacatttaaaatgataaactatgcgacattccctctgtttactcactgctatcctattcagctgcactgaactataatggaaagttcaggcaaaattaactgtgagttttcaaaagcaaataagatcaaacaacttgctgcaagggaaaaaaaaatggaagccaatggaaaacaatttggatatcatttctggatcaaagaataaacctattaattggtaaaaaaaaagaaggactcaatatttttaaagctattaacattttttatactcaacacacagattcctcccgtgcatgaacatggaatgtccaatcagggtacagatggcgaacatggacgcctgcaatatggacggcaacatgcacttcccagcactgcgggcagtcagggaggcagttcacagattttttcctgggaggtgggtgtctctaggggtgggtggcaacaatttactggaaactgacaaacaaaagaacttgttttaaagtgaaattagggttgggcgcgatggctcacgcctgtaatcccagcactttgggaggccaaggcggtcagatcacaaggtcaggagatcgacaccatcctggctaacacggtgaaaccccgtctctactaaaatacaaaaaattagccaggcgtggtggcgggcgcctgtagtcccagctactcgggaggctgaggcagcggaatcgcttgaacctgggaggcggaggttgcagtgagccgagatcacgacactccagcctggcaacagagccggactctatctcaaaaaaaaaaaaaaaaagaacgtgaaattaggtactactctctgtaacactaattagataactgagttaagtgtgatacatttatttcttttacattaagtagttttctagacataaatatgaagggttcaatttttttttctttcaaagtccttaggattaactcaagcaaaaccagcgaccatctcttttgtaatgtatgtgtgtgttggactgatgctcccctaatctttgaaggaaggttcaatgtgaatggtattctccaatgcataaatgagataattggggcaatggaagagaactacttctgcaatactctctggtcctaactactttttcagtttcctgctaaaagtagatcattccggatctccttgagagaggatttccaatgtggccagtggagtttcagaagacatgtggcatgtggcagcccctgctctgtgtgctatttcctatcctgacgattcttacgaatggaagccctacgaaaaacaatcaacactccagaattaggtttcaatgatgtcagaggtaacgtgcagatcatcatttagcagtttccaaaactgttgaaaagatgaaacttttggacaaaaacctcattcaaaggagttcattaaatagccatccttctttcttttctttttaaactaacctagttattgcattctaaaagattatgaagcattttgttaaaaaaaaaattagatatggtgcaaagtttagaaacggcctcaccagcccaccaggcacctgatcaccctccatccctgagcctgcagaatggtgagagcaagaaggacttggcacagaacaataacttgaatggaattaagctgactgctgaaatgcaaacatgcggtaggctttgccaatatgagctacaaattacggatttccgaacagtcttgggcacagatagggtatttcaagtgaggcgacaaactgaagtcgttgacacagcacaatgcccttgcagaccgccttccgacacagcttaattctatcagcgtttccattgtcattcgcaagcagcacagactgacaggctgaagacccacacctagtggatttcacccgcctagagatccttgttacccagtgctgctccaaagcagctccctgaccccatgaacacttacaggggaactcaggggctgtgcatggattaaatacagtctcaattctcaatttcacaggtctttgaccccccacaggacaggccacattttgtactaatgcctgcttatcccctcctacctcgcaaagcgtctggcaccatccttcctcagtctttgttcaaggaatcgatgaaaacttgtgaaatggtttagagcggtgcttggcggtccccaggaggccctgctcaaatgccaggctgcagaatcacccagtggcatggcctcacccacatgatgacagccaatccctctgtgtggcgaaagatgtgggcttgagaactttctacactccagaagccattactggcacaatatataagtgttcaagatcaaaagaaattgtattataaaagttttttttttaaatctaccctagcttgaggtttggtaaaatgccttggccacatcccccaactgcaggtgtcctgttctgcatctggaccacacgccttgcctgggagagacttcagtgatggaggagacaatcccaaaaggtttctgaagctctcacagtcacatgccaaaaagtccactatttattttagaaaaaaggatttggaaacttggttaggaaacccatgcatcgaggatgctatttccgaattgctaagtaaaaagtttatcatttcctatgcacaaaaacgaccagctctttttcagtggcatagcagggatgggccgataaccacgctggtccctggaggctaatgtgggctgtatcctggcaatggccacaggtgtgcaatggctctctacggattctgcagtctagctttgacattgatctactaggttttagtaacagcttgacatctgaatggtttattatcattagcatatgaacacacacttatataatattgctgaatgtaaaattctcaaggtaggctcaactcaaaccctggaggcagcatgtgtcttagccacttactcatttttggtttttgtttttatttttgaaacagggtctcactctgttgcctgggctggagtgcagtggtgcaaacacccctcgctgcatctttgacctccctgggctcaagagatcccccaccacagcctcccgagtagctggggcaacaggtaagtgacaccatgcccggctaattttctttgtatttttttgtagagatggtggtctcactatgttgcccaggcaggtctcaaactcctgagctcaagcagtctgcccaccacggactcccaaaatgctggggttataggtgtgagccaccatgcccagcctccacttactcatgtttagtcccacttttttttttttttccttaaactccttaatgcaagaaaatgcttgggaaagaaacaggagtcatttaaaaaaaaaaaaaaaggcacccactcgtggtgttcccaagtagcaaactgactgggcagagtgggaaggactcagagacaactcactgacccgccccgccagccctctttctctgctggctctgacgtgggccagtcagccctgactcaatgctcacatattatcacacgtgcggctcatcccattgttagaggataccattgctgagccaaacacagggcactgctttaaacagacttggctaatttctgcacccattacaagctgatacgttaaaaaaagaaagccagcctactatcatctgttttcaaatgtttccaaattgctcttctttctcagaatgacagctttggaacattagcgcaaatccccaccgagatttgcatccgtattcttggatcttattcagaacttagccctgctgaaaaatacacagttaggtcaaagtctgttcatgggaaactagtatgcgtatttcagaaggagctctcacctacaggctaccccgaggcagtggctggaaactgcaccaaaccctgtgtgtgtatctgtctatctgtctgtccaggcaagaacatttggaattttctagtgcagttcttggtgctgccatcactgaagcaactgatgcagttcgtaagttcagctttctgctacttcttcccacagagtgacatatttttcttattagacttagagcttttcaaataatgatgacctgagaagcgactgctacccctttcccagaagtaagagatctgcaaaattttgctcgttcgtgagcattttagcttctgtttcaagtcttaagactaacatattcccagactgtcaggccagttttatgaagctgaatgtgatataaagcttaacctgcctccttttgttgtaaacattggatgcaaagaagaattaaccatggaactagaagctgctggctgaataaaaatcccacgggaatttctgttccctttctattcctcttcccagctccggatgtgcatcctgtgtggggacagagagaaacattcagggacaaaacctaagtcacgaggtctgatgcgatgtgagaactcgcggctggcacgcgggtggccatgggggggtgggggtcccactccagcacaggactccatcctcctccactgcagcctgaaagcagggggcaaaaccaacctgctgtctgaaagggttttgtttttttgtttttttctaagcaaacaagtctgaccttccatccctaggaaaggcctacttatgatgagaattctgatgtcaatgtgaggagacactgcccagaccagcaactccacagcaagtcagaaatacagagattgcccaccgcatgaaaaatgtctccagttttacaaaggtcaattggtaatttacaaaacctgattttgagatgactttaggaaattgttgcttctatactttttctctacagagctagaatactgttcaagcgacagcagaaaacatcagttccctaaacccaatgtaaaaattgatgatttctctagcaatttgggctcaaagacactgcaatagcttgaaccaggaacatacatcctaagcaggtaaatctgttttcttcccaggtacgtggtaggttttacaatgggaaagggactcctccaagtcacggttatttgtgcatctcttcataagtgacaggggtgagaagaattgcacgctggcttctggacaggaatacagttctaagcagcattcatcaggccgcactctggcccacttccttgttgtgaaaagtcacatagctctagacactgaccacctgcacccctattgttctgggctctccgaccttggagccataaagcttttgtttaaggatcacttaagatgtttttcagaccctgaattccagcaaccagtttgaagacccccacagaggaatggcattggtgtagaatatagcttcttcctctccctgtcccacgaagtcaccctgtactcttccacaaatcaacaatctccacgctgcagccactccaaaagccacaatcctgagcccaaattcctcggggaggtggatttgaggttttctcccatcgcctcgttcagggatgctacgattgagcctctttctctgctgcaacccagtatctcggtgtactgactcctgtgtgcatcgggcaaagaacctattacgcttacatttcccagtcacctttcatgtttgaggtttcatcattctgaaaggtgacacagaatcatcatggaacaagagcatccttctccctacccagataggtccttcatctgggcgtcatcagagaggtgggctgctgtcacctcacttataggtaaaaatatactttaggcagactgtggggaaaaggaaggagactagaggatgctgctctaggaaggatggcccagggtggaggtgatggggaatcctagagtgacagttgctaagtggggtatctgggggaaaacagttggggcagtgagctcaggactggagtgaaagggccacggctagaagccctggggtaagaagatgcaatttctgattatttctcctgtaatccaggggttatccatatgcacttatctggagctggtctttggggagcagtgaatagcctgttcctggaccctctttctctcttctgcaaagtcctggatgggcaggaaatcaggtggctctctcctgtgcaagagtccttgttccaggccctacctgttggggttctctgctcgggttcagacagagcctcacccactgggtgcaaattcactcacaccaactcctcagctccacaggcgactgactgtagatgttactacattttcatttttcttggcttgtaagtccctaatgacttttccccctactacctgacatgttagaaatggtcattcccatagccactgaaagatacccatgttaatctccacctctgagtcaactggccttgtaagcacactaacccttcatcacagaagaaagtgaattatgtgagtgggttgtggttgggaaccacttactcctgagaagacagcagaatcccaccactaacctataggaatgaagatgaccaagtcatgctggaatagactcaagagtacagaggtgggcaactggcacacccaaaggaacacaggacataatacaaaccttcctttcccaccacaataataaaaccccaaagagaatgtaatgttactgtttctctgtggagcagaatccctctgagtccagctgtctgaatcgggcgtcgttattctaggtaggccacccacagccttccagtaagctccaccagaaacccaaacaaaacacaacaaaaaaaacttgtcagggcagtctttgtaaaagtacaatcccctaatgaacattttctattgtttcacccaggcagatttagaagcccgctagaggctggtatgctgggcgtggactcagtgtgtagctggtgtccagtgttctggccaagtccacgagttctcaggcaagtgccaagaaacctgcatgccagcaaccagaccacggggcattagccggggctgactcatcacatcccgcctcgccaaacacgttttctcttcctgttacccagtgccaagtggctgtgctgaacaagagggcacaaagtagaacatgccctccccctctctgctaagttcctccctgatctacggcaggcagttcccacccagccaacaggcagaggcagctgcagcctgagtgcgcagagggtagctcctgccggggtgaggaccgtgggcgcggagcatgcttcccaagaacagcccgcagggaagacgcccaaaacctaaatcgacataaacacggtcctggccaccacgtcccccacagactcaatggtcaggtggccggggtcactctgaaaatgaactgttctcccactgagctgtgcctcaacccaaattaacctgaagttctgtttacagggattgagagaaatgaatggattgaattatgctaatatcttcccttcccataatcctaattgagtgatatggtctggccttagagtttctctggcacctttgtcaaatgacagaaaaatcagcttttgtgtttttgtgtctgttattaaaaaatgttttaatgaagtattataccacataatagatatatagaaaagtccaggcaacttacagaaataatacagataaattacaagaaagttgttattcccaggcaaatatccagagttcaaaatgaaactcgaaatccttctagtctctatatacagactttcctcactctgtgaaccctcactatcctaatattttccataacaacttgcaaaacattttagccccagttcaccatccaaatagaaagcctgttacaccagtgtatgtcagggttcttcagaaaaacaaaaccagtaggtgatatgtgtgtatgtgtgtgggtgtgggtgtgtatagagatgtatatgtatatacagaggggtgtgtgtgtgtgtgtatatatgtatgtgtatatataggtgtgtatgtatgtgtatatataggtgtgtatgtatgtgtctatagatttgtatgtgtatatatataggggtgtgtacatatatatgtatgtatatataaagatgtgtatgtgtgtattacatctatgtatgtggggagagagagagagagagagagaatgaatcagcccccacacatatagaagctgacgagtcccaaggtctccagttagcaggctagagacccaggaagaactgatgttttagttcaagtccaaaggcaggaaaacaccaatgtcacagctcaagctgtcaggcaggaggcgtccctcttccttgggacagggccagcccctttgctctgttcagactttggctggtggaggaggcctacccgtatctagggggcaactgcctcactcagtccagtgactcagatgttaaaaccatccacaaacaccctcacagacatacccagaataagggttaactaaatatctgtgcatgtgtggccaagttgacacatgacattaatctgcatcccaagcagtgtgtgcccagggcaacactcaaggctgggctggggcagggggagggtgagaggcaagcggtgtctcagccattctccaacaggatggcgaccataagtggggcggtaaatgtgcttataacatcactgttggtggccccatgctgttaacggaaaaggttttccaggaaagtggcaaaccgtgagaagtagtgagggatccgagaggcctaataaagcccacaccgtggagaaagtctacagtcacggagcatcacaagtgctggctggacacgtgaacccatgatgacacacaagctctgacatccttgctatgaaggtaaattcagtcttgaggaaacatttggtgtttcaagtgctttatgtgaggcagaaattcttgaaagattatattggagtttcagagtttttgtgtatttgtgtattttgtggttttgtgcttttgagtgggttgagctaggaaaatgtaattttttgccatttaaaataaaggcatgtgggctcctgatattcataaacttgctatgctccatctcttcatgaggattagatctgggttaagaaggaggctttggacctggaatatgacacaccggaactactgtatcattctgtagtgggcagtgtgggcaaggattcagtagaggaaaagagacatggaatatgacacaccagaactaccgtatcattctgtagtgggcagtgtgggaagggattcagtagaggaaaagagttctgcattttctttctcaatgcacagggatagaggcatgtaacaggagaaaatacatgggtaggatgcatgacatacgaattttgtcagtgttgcctcatccttcaagtgtgcaccagccaaacacgcaaaccttccgacacttcctgaatgccaaaatcatcacatcagagccaagccaaatgaggcagaaaccaccatgctaagtgatgaatgcttctcttattaaggattagttaataatgaccatgctgtaaattactgtatcatatgtccaaagacatccccagtggactggtgagtaagtttcagtaacttgtatgagtaaaaacgataagcagggcctcctaaactctcccctatccagaatccgaattgagtaatatggtctggccttagagtttcactgtcacctttgttgaatgaaagaaaaatcagcttttgtgtttttatgtctgtgttattaaaaaaaagttttaataacatgttataccatatattagatgtacagaaaagtctaggcaacctaaggaaataatagagatatattacaagaaagtcaagttatccccagacaaatatcaagaggcctcttaaaatgttaccaaaaagagaaaaatctatgccacaactaaagatccacatttttacaagaactctcagcacctttcttctaatggcatttaagaagaaaccaggaaaacatacacatgtgaacttacaaagatgcaaaccgcatgaccttccctgacactagcactatgacatcaaaatcagcatgatttagactgagatgtgagtctagtgggcatctcataccacacactgtcaggacagtaccagacacagcagacacaccagaccacacctactgctcataggccatggaaagaagccaccaatgaataagctgggcatgcatttctggccctctgtgttctgcaggggaagggttctatcaccaatgggcccagttcctgggattccaagcacatatttcaatgcgcttacatgaaatactggtttttatttcaaagaacaactagtcttcatatttcttttaaggtcttaacaagtaccttgcaatacaataaataataaccaaacacaatgaaggcagacatgaagataaattatcattccaatgaggcttacaattgttttcctgacagtgaatgttctcaagcacagtgccagaatgcagcataaagaacaatgacacattccatacatttcgcttaagatatgtgatcagaattcagaggagaccagggtcttaatatgcttagggggcttctgaggaaggaaaatcacaaaacacacacccattgtgacgggaaatcacagcagaaaaaagagaaatggggtggtcgcgaaactccaaggccccgcttggtgggaggggagggagggcaggcaccagcaggtggagggggtggcctgggcagaggatgcaggtgcaacgtgaccaagtgaacaggaggactggcttcctacccctgaatctgcacccctcttacaacactcttgctttttcttttattcttccctaacgcttccccaagcatacaccaaaagaaatgctatcaatggtcacttattctcatgcaagtggctcattccacggtccttttggggcgtatttcttagcccaacatggtgtttttttttttccctgagactaatcccattcactcatatgtgcattggtaatccacacccctactaaataaagcaagctttttgcaagtattgatcagagaaaagcgttcaacttatccaccattaaaacaaaaaactcagggctgtttccagtagcaagaacaatcatataaacgaccttcctccatgttggaggtgtgtttcctgggtgcacttgtgcacacacactccccctggagccctacacacctcattcaggagaccctggaaggccagcgggcaggagccctgacctgcaaatgtgttgtcatctccacccatttcaagaccttccctccatccttggaggatgagaccctgtgcccagctcaaggtccctgctttgtccccgataccctgaacacttggtcttgctccttcctcccctccaccattcttcagcttgtcccccttcccaggcctgctcgttccccgccaatgggttccctccctcctataaagaagaaaatctgttgagcatggttcatcgttgactgctgctctgtgcccctactgccaccccctccccattgctgagcccactctgggagtcaccctcgactctctcatctgcttgactctgtggggggagtcctgggtcagtgcttacctgtgacagtttctagcaggcaagacggctgaaggggtattaggaactaggctgcttgactcttgctttcaagttgtagtcacagttgacatgtaccctgccccaaagccttggaaaagtctgtttacaccaggagtgtccaatcttttggctttcctgggccacactggaagaagaagaattggaagaagaagaagacgatgggctgcgggttggacaagcctggtttacacagagatttttgagagggaggctctggagcaatcacagagaagcaactggctttcataccaaacagcatgagggaggagagagcggccaccagaagccaaggtcataaaagtgagggcgtactgagcacgcatatgtcaggcactgtgcaaagcattttgcaaacattatgtcattcaatcttcaaagcaggcggagagggaggcattgctggctcatgtttagagatctggggagggaggaacacagtcacccgaaactataagccctggatattttcagagtccttagagaaggaattagacttcctacaggatacaggacacgcagcttgaggcaaatagatttcaaagcaaaatccaccatctgagaggcacactccaagcagcaccacttactcactttgcatctctaggagagctgcttagtctcctgggcctctgtaaaatggcgtgatcacagtacctacctcgtggagttaatgcagagatggcattaaccagtgttggtgatcagacactacctattatttatattattgttagtatcacccatgtatacatacaagtctctaagtatgcatttctatgtgcatacatacatagcacacgtagaatcaatgaatgtaatgaccatctctggctctctgttgagagaaacatgaaaatttataatccctgccctcaaggagttcagactctggtgacaaaggaataaactaaataggtagactgccaagcacaataaaattcattcccaaactggtcctaagcacctactaagagcccggctgctactaagccttgagtatgtcaaagtatgaccctttctctgcctcaggctcaacctggcgggaaagacaaacccgttacccataaccttccaacattccaagaaacagcctcagaagaggtttatcccaggtgctggaagtctccaggtgggacacaccaagttaatccaagatgctgagctggtggatgggacagcatggccacgatgggggctgggggctttgcagacgaggtgtcttagttgagccctgaaggctacttggacttccagaagttgggggtgcagggggcctgggatgtgtgggcaggatgactggggcagaagcaggggtacaaggacaggcgccccggcgggacagactgagaaggcggccgagccagaccgaggaacagcgcaaaaggtaacatccaagtcacaacaggagtccagagggtcctgagtgtgggaaacacaagctcttctagcttttagtccttggagtcccttccagtgtgtggaagagatccagcctgcaatgactggagggtgggagtggacgaagtttattctggagacaacaaggggtcctggtggcttttccggggtagtggagacaccgccacgtctgtgtctctggagaaggaagatggagaaggcatcctccggtgggatggggtggagctgggagaggccccagcgggaagcactcggaggagcgggggccaacccggaatcagcctctgttccttcttttccgcagctcacctgttcccggcttttcctcccagtctcctgggctcgccgccagcggtgggatccctcttcctgcacagaaccgcctcttccttcctcctggtgacagatgccccctgccacccccaggggctgcggctcccccagatgcccagcctcagcctcctgagtgctgtgcctgcccccactccatctgagcggctgaccagtcaccagactcacccccacccgccctctcccctccacacagggtagcccccaactccagccagagggagccaagacctcccaccccaggcagatcttgtgggcaaggtatctgcttaaagacattgatggattttatgaagaaaatatttaagccaatttaaatatttcagcaattgataagtaactcagcttttatgggctggacctttagggtattgtttgtaagatgtatatgattttcatatctatatcagtgcttataatattgtttgcatgaaaaaaaagtttctcatgtttgccatccatttacaaatgagctttacctatttgtaaattacgggctttcaacacgcagctggacgtggcaggaaagaggagacgattactccgtgtctcagcatgaagaaatggcagatgtcagatgtcagcgctgccaatgtttcagcactgcggttccttgctcactgagtaggaacagtttgcagaaatactggacaacctgctgtggataataaactatgtcccaggctctgtgtttcctcaggaatatatttacttagagaagcggcctattaacatttcccgggaaaatgcaaaatccattttgtgaagcagtgaggctgagttttcatagttctttcctcctccaggtgtcttcactccaagcttgtcacccgcatcattcgatcaagagtgcccagaacatcgcatgtgtcaaatccttaccgtttctgcctaattggcagttacagcctcggcccacctgtttccagggttcccagtgtcagtcggacactggaggggcctccctctccccaccagtctctggggcagattccccctcagcctaaacattctgcactgcagagggcctgccactcacaagcagcttctgtgccgctcttccaaattaccctgaagacattccctgtccgccccacgcctcccctttattctctttctcatctccaatgttaaagagtttctgaagcaaatgacaatgacagttgacagatttcagtctgaatttcccttttctagggccctcttctaggcatctatcttgcacttgctctttaatgtgaagctttttgactatttctgttgtaggagctctcattcagacgctgtaaaaacagctgttttccaaatacacaaataacgcagtctagaaaaactgggaactttctatgggggaaagtccttgctcatcctcccgagccacggatcaaggtcgagggctgcagcgtgtccctgcggcagcatcacctttctgagagtcctcaggaagcatcctcagtggccagatcccatttcaagggccctgtgcttcagggagcgggcaggagctttaggacatgtgatcccttatatgtctgagccgtcatctgtgggccatgaatgtgtttttaaaatggtcattttaattacccttatgaggtgttcacgtggttccccattcagagtctacagccaggagggaataaggcagacaccaagagccacttggcgaagtggagatggctgggctgaaagtcactcctgcatcttcctgttgagtctggcttgaaattcctgggagaaaagagcaggctggggccagtgctcggcctctgctatgcaaccagaggctctccaacttttccccatcccaagtgatttaagtcaccgccaattccaaaccattaaactcacactggagagaggcccgttgtttaagctgagatggtgctgacagcgaggcggtgggggctggctttaacgaagccctgagcttgttcttctgcggtgtgcttcagccatttctccagcttccctcgggactgactgagctcatcagaccccgggatccaaagcctgtgctgggatgcaggggtccgccctccctggcacctggctgcaggctttgctggtgtggctggcctgggccccggctgcctctgcctacagtgccatccacgctagggaacagctgtccccacaagaaccatgtggtccatgtctgggcagtgaccgcctcacttgcagccaaccccacactcttcagtggtgccgaggtcctgtggcagactcagccaatcccagtgtggacttgactcggtcttggacaccgggggccagtgagctagctgttgggccagtggggctcagcctgatactggacagagcctggacctggggcctgtggctggggaggggtgctcctgtgtgggccaacaggacggccgatggcctggaagacagtgtgaccgagctatcagctagcactcgggactccacatggatgcagaggtcaccgctggccatttcaggagacactacgcctaggagctactgcagccagcactgccaggcagcgacatcacaggaggacatttctaacaaaacaaaaagcatcttcccatcttcgtggacaactgccatgtggttctgataaccacttttcaggagaagagacacatgaaacttgggatagaaataaagaatgggaagagtgtcatggaaacctagatgaaaatgtaggaattaatcttcaaagttcagtgtgaggtgtgtgacagcagggaacatcctagggtgtacagaaagggaacagacctactcccgggctcctgggacgtgatggccttggctgggcgcaggctgctactgcaggggaggccatgttcctcttcatgattgtaccacatggggaagagcctacatcggtgtccttgccagaatatgccagaacatgcctggaaatcccaggctgctccttggcatctccaaagggccccttcacaggcgtaggcagtgtatcaggcagggacacctgagccctgccagccatgtctgaatgagggatggatggctaccacctcagtcacctcaataacctcactgttggtgccacaggtctgcccatccaccacatcaccagaggttctgtctccagatgattctgaagcaccaggctcaggcttccaggcagcagagctctgcacaggtgcagggggtggccctctcccaagctccatgcgatgctatggtccctggaagtccatgctgggtctgcggagcctgtcttgcacaggcccatgggtctctcacacctccccacccttgcctggaatctccccaagcctcttaagggaagcaattctgtccactcctggccctgaggtctctcagccaggagctacccttgctagaggggcggggatgagctctgagccagtccctgacagccccactcctgcacctgacaggctcagggaagctgggtgattggctggagatcacacagcccacgcaaagctgaaggtctcatctcccacactgttctgtgcctgtggcaggatcacagaaagcagagctggcaacagggattttccctcggacacagtgacttccataaaccctacattacatcgtcgcaggtgcaaatgtgaactaaaggagcttcttagcccaaagagttgcaaatacgctgaaaacagcttccagaatgggtcacatgaattaatggcaaaaaacaatccatgatgagccactgaggtaacccaggaagacatcacaaacacagaggccttcgctgcccttccgcagaacaccctgcttgctacccacaaaagcaccctttaatcggccatgagtcacatccatggtggcaaatcggatgttctttcctaagtgggatttgagaaatccaaatccttgacatgtgcttggccgtgagcctgcagccctgcctgtcctcccatgcagaccacatacttcgactcaaccttgtgattcactttccacacatccctacacacccatggttaatagggagacagtaacccagaggttcacgtgagtcactaaaaaaccagaaggaaaaatgagtggccacgtgagagcagctgtcagggaggagcaaacacccaaagttttgattaatttcccagggatctaatttaacataagaagtagacatggacagattaactatgggcacatgacaacacatcacggtaccaggtttctaagaaaaatgtttgcccaggggactagcttaaaacagagagtagtaaatcggcagcggactggtttgcttatagcccaatgtgcatttcactgtatcactgaactgagctggggtttcgaacagagctgggattgagataaatcacagcacatgctcggccctcagtctaaactggaaaacctgttcggaggaaacccatgcccttcccatggaacgagctgaattacctagaccagcaggagacaagaggttccatctctccccagcgatccgtgctaagcttacgtttcccaagggcctgtcagaaaaatggattagagaaacctatttccctctgaatctaaaagccagctcacctggggaaagagcacaccaccaaagtccaagggcacgccagtgcagcctctgcgcctggcagctcctcctcctgggaaacatcctgtctcaggtctaggatggaagaggaaatacctccaccgccagccccagaatcggcccttggacatcctgctctcgtaaccaagagaaaaggggacactggatgcccaccacaggcctcagctttcttggggtgacaggaatctttaagaatttcatgaaatcttggcattttcttcctggaaaaacacacacatgcacatccacataaaatctgtcacagactgtctggaattcctgagacccatccacagaagccatgttaagaaagcctgttctcagaggactgcattaaaagaaaattgaatccaaaatctattacttggccaggcgcggtgactcacgcctattatcccagcactttgggaggcttaggcaggcggatcacctgagatcaggaattcgagaccagcctggccaacatggcaaaactctgtctctactaaagatacaaaaaaaattagccggtcgtggtggcaggcacctgtagtcccagctactcaggaggcttgaggcaggagaattgcttgaacctgggaggcagaggttgcggagagccgagattgcgccatcgcactctaagcctgcacaacaagagcaaaactccatctcagaaaaaaaaaaaaaaaaaaaaaaaaaaaaaaaaaaaaaaaagcaaaattttttactggctaccatgttttggggctgaaacacataagacttcggagaccccactaaccaggcagagccctgccctggaggtgactgtgcttgtccctgcatagctagtgaccagcacaggcccaaagccatctctgaatgtatgtggcataattactgaaactagaaaacaaacatgcaaatcacaagtgcgttttgtgcaaataatgtgatattttaaatcagaaaatctgggtatcaatctagactctgcttcttcctgatttcatgattttgaacaagtacttttttttcctcttttaccaaatactgtagttgaaagtgtattaaaaattaagcttacattaataaacgtatacaaaagattatattctggatttaataacaaagaagggtattgggaaaaaaacaagtctgtaagtaaaaaaatgcaagtttactctaagttaatgggtacagacacaagcatgtcccgtataattattccctttccattggattcctccccaaggactggcacaatcttcaacccacaggggctgagaccccgcaggggccttgagactggccctggtttggcccattctgctcctcccgtcttccatggcgggttttcttctgagcgacctctccacagggaggcaccgagggctgggcgtcacgtgaggttagcgctgttcctgccctggccgctttccaagtgatgtttactcccatttcattcggctcccttgcagcatctcagatgtttgcatggtatgtgtctctttctgtagaagaaccttctgggtggtttgggaaaggccctggcctgtcatcggatgcctctgccctcgctgggtccctgctggggccgccctggaaatctccaggccaggcattctcaccaccctcttgccttctccctggacctgctctcatgaggggtctttctggtcactcccaggactcctctatgggcaggggccacatcgtaggctgctgcacggaccacagacaaggtcaccttgggagctgtggacttctgtgtccttgtgatccctctgggaactatacttactctgcacggtgattcgggacagcaaggatggcagaacacttctcaaaggacacccccctcgggaataggacatctccctgtactgacttggtgccgattccttgcaaagcgtcttcccctcgtccttcaggactgctggccagcactgaaacttacatcccaattctacagtcccaggagaaaagcctcactctgtactttcaacccctgccattgcgctgaggatcacaagattcacagaagagatgtcttattttcactttgcaggtcttaaaactctgaactaaagtactgtctagacaattatcacttgaaagaaagttcagcaagtcacacatataaatccaagggagaggctgtccagtatgagggtgacaaagggacacgttcccacaaaagaagcctactgagtacctgtcacctcttgcagcaaccccaagggtgtaacagcaactacgtggtctcagacccaggagcttcctgccatagctccagaccctcggggagcagcactgaaaaatggcagcaccccggtatggagaaacatgggcagtcaccgcctcctcaaagagaggcacaagatgggtcagcaatgggccctggctccccttccactgtcctgcatgccccgaagctgtttctgacagctgcacccactccccacagtcagatgttagggtcaccaatgacaacgcattgatttctgtttcatgtgtttcacctgcaaaaacaaaaacccttaaacttaggatataagaaattgccaccaatacttaaaactcttggacatttcagcaaatgaagtaagcacagaaatagaaataagaactacaaatatagctctaaggcagtatgcttgtatattcagcataaactaaaataaatacagcagatctaataatacagggtttagatacaaaaagaaatacacacataaattccatgcttataaatcaaaattagcatgacagtgagtgccacagggaaaccagacaacattcaaagatttactcctaaatatttaatagtgaatattaaaatattaaaaataacaactaaagggtatacagaaaagcaaagggaaacattacagagacacaaaggtagatctgaataagtagacaggtaggctgggaagactgagtatgttaattctcttcactgtaatagtgtttaacccagtttaaatccaaattttaagaggcctttttaggaatttaaaaatggcaaactttttctaaactttacacgaaataataaagaatagcataggaattctgggaaaataaaggcgtgagagagaagtcgcactgccagatgctaaaccatgctgtgaatctgcactgtcacaacagtgcggtgaggacgcaccccaggaccgatgaggccggccccgcatgcccagcaggcctgggagaccgaagcactccacacaggaaacagtaagcgcgggaccaacccataagggataccggggaaactgccatgaaattcatcaggtgaaaaatcgagtccttctccagttgccatcagataccaaaacatcttctatcggcttaaggttaaacgctgacacacacaacacagagaactagaagaaagaccagcaaagaggttgctgcttcccgaacagcaaagaactcaccctaaaagcaacagcagaaagacaatgatttagctacacaaaaacgtctgaactttaaaagctcgtaagcaaaatgaaaaagccaatgacaaacagaaaatattgagaaccacaaaatagtgtgtgcttgggcgtgtgtgtgcatgaatgcacgcacatgcgcgttctagcactccaaaataaacagtggtcaaaggaatgaaatgcacagttacatggggggaaatttaaaatccaagaaatatattctttaaagtagtctcattagtaatcaaagaaataaaattagataggtgagagacttttttttttttttgcctatctagttaattaaaatgttgagaataaaaatatctaacatttgccacgttgagcgtggtgacgacttgctgacaaatgccagtgtgagcgcagcttgaacggcctctggaaagcaatctggtgcatttgtatcaaaaatcataatcttgaaacaactgacttcctttttagaatttttggaaaaaaatcagagccagggacaaatacttctgtgtaaacgtgccatgttggcattatttatagtgaagaacagtggggggaataaaacccttacatcttctatattgtcttaataaaggcaaacaacagaatattatatataaaataaaatgcattcataatatttaataacacgagaacatacactataatactcagtttcattttaaacacaaaattctatgttcagaattttattaattttatagcaaaactcctacatagatataaattcaagaaagaaccaaaatgtccccagatattaaatatgtgtatctgagtggtgggattgattagggattctaattttctttccagttctctaattggaatatctgatacaatgtcttccatatattagctacccaataaatattgagaagaagaatgaaacgatttcaaacttccaacataaacatgaacgattactaattctaagaaaagagtgaaagcatgttataaaacaaacactaataaacagatattggtttaggaaggtggctggtggcctctcaggctggctaagccaagggatgtttacttttgtcaatttctgcagaaaccacacaagtggctggtgacgtatttagctctttcctcacagtaaccctcctgaggactctaggatgatgttctcacatagctctcattgccggctgctttccctgcctgttgccctgtggcagagccctagttatgggcttacagctcctccacgctccactggtcatatggcctggggataggggaccagggtggctgaacctggaccagcaaggccccctttcctcctgcctgtgacccctcactgagggtccttgggggacacaagcaaagaggaacatagcccacacggagcccgcgtcactagcaacggcacacgtgtctctaccctcatgcagggtgtgagacagagcagctcccacgtcctctgctccccttgaatctgcacgttcgggtctacccctgcctgctgaagaagaaaacaggggaaatgcaggaatgcagctcatgaggttgggcccagggagcccctgcgtggtcagagggagcggagcacaggaaaggaagagaaaggagaggctcctctgcatgcccagccccaccccacaccatgaggacagtgtgcctggggttcccggggtgcccagaagctctcgggagccctccttcactgacaggagggatggcccggtgcagggagggcaggagggtgagatctttggtctgtgggaagccacatcagatgcagaaagtccatttcaaagacaacactgaccctgcacaaatccagctcctctgccctgtcacgagaagggcactccatcagggcaggcgctcaccacctctggttagagcttccagaacctcgtgttatgaagcacattcagggacgggcagcaccctcgtgcaaactcagggaaaacagagggtccactgctgcacctaggttgaagaggatggcagggtctgcagggggatttttatctttttctacgtaaaggacagaagacccagcgcacgtgttctgatgcaggaagacgtactgctgtctatgtaaagtacagatcaacagcaaacccaggaataaattcctgctgaggaaggcatccaggtgcctccctgcagaatgtgcccctgggtcaggctgcagctgactttttacaaagtgagctcgccactgcaaagccccatgggttttgtcacactgactctgtggctccggcctcaccggcctttgctgcacttactcccattgactgccagggtcgtgaccgtaaacaccgaggttctcttccagagcctggtggcataagcttgcagcctcgagtccattggctgcgtggtgaaacagtctgggaacttcccagttttgaaaaaagttagagatggaacttcccagttttgaaaaaagttagagagaacttttaaatagttaatagagcattcagagagaagaaagagctcctcacgcatgtgaaggtgtgtcagatgcagcaaatccatttcaaagggaacgccgacccacaaagagcagccacgcaggatctttaaaaggactctcagtcctaacagctcacaataaaccatctctacgcggtccactcaagacacactcaggccctgccgtggtcattctctctctacagcacacagagggcaatggcaccactccttgctcttatcctgagtcctggcgtgctgaccgaggccaggtgcaagagggttttttaattttttaaattctttaaaaaaacattctggattcaggaggtccatgtgcaggtttgttacgtgggtctattgcatgacgctgtggcctggggtatgggtggccccgtcacccgggtactgagcacagtacccagtaggtagtttttaagttcacatgcccctccttccctcctccccagcagcccccagcgtctgttgttcccatctttatgtccatgtgtattcaatgctgagcttccagttttaagtgagaacatgcatttggttttctgtccctgaattaatttgcttgggataatgacctccagctgcacagatgtggctgcaaaggacatgatttcattctttttatggctgtgtagtattctatcacgtatatgtaccacattttctttgtccaatccaccattaatgagcacctaagttgattccacgtctgtgctattgtgaacgttgttgcagtgaaaatacaagtgcatgtgtctttttggtagaatgatttattttcctttggatatatacccagtaatggaattggtgtggtagttctattttaagttctgcaagagtattttaaataaaaagttatataaagataggagtaagatggaaacaggaaacatacaaatgattgcagaaaaaccaggttaattcatcaggtagcttgaaaagcgggactttctgaagcagtaaaatatctgactaggttctatataaatgaaacttgtattacctacaaatagagtagacttagtaagacaccaagaaccaccaggaagagctaccaaggatctacttttgtcaacagataagaatgattttaaatgaacaaatcgagaaagatggaacaaataatttaaaaatttccctggtctgccccactgctcccagataatttcaggtatctggcagaagaaactgactgccccaaccatgataggcacagccaccaacaaaactagacatgcaaaacgcctggctcttttaacacagcttttgtttacgaacgccatacaacttctcagagcacattggaggaaagattttcaacacataaaaactttgaataactacaatgattcatgtgatttttttgtctttgcattcaaaagtcagaagcataacacgaggctatgtgtgatccgggctcagggagtacgggggagcgctcagaagtgtacggagaactattttcagcgctggcttttgctggagtccagacctgccaaatcgagcacgagagggcaccttttgccaagatggaagcactatgaaatccaaggttgctcatttccggttcattgtgtttatcgtgtgaggctttccagaagggaaaaaagccagcttctattttaaatgacgatccactgatgagcagatgggtttggtgttgctttttgtttattctctctacatctgaaaatatttcaacattttaacttcacagaagtataatgatttttctttccttttttacatgctttcattattaaacgttttacctcaggagagttaagacctcagaacaacacctcccactgagctgaatggaaggacactaatgggtccactgcctctttatcaatgggaaccatctctctaaacacagaatttcctccatggattggtttggaagaataaaattttcaggtgtaaaggagctcaccaagatagcaatctattcatttcacatgaaaaaaaaattccaaagatgagaatgaatgacttgaggtcccaaataaagcaaaataggtgatatggtttggttctgtgtccccacccaaatctcatcttgaattgtactcccataattcccatgtgttgtaggagggacctggtgggagataatttgaatcatagaggtggtttcccccttgctattctcgtgatagtgagtaagtctcaggagatgtgatgggtttatcaggggcttctgcctttgcttctttctcattatctcttgccaccaccatgtaagaagtaccttacacctcctgccatgattctgaggcctccccagccatgtggaactgtaagtccaattaaacctccctttcttcccagtcttggatatgtctttatcagcagcatgaaaatggactaatacagtaaattggtaccagtagagtaaggcattgctgaaaacatacacgaaaatgtggaagtgactttggaacttggtaacaggcagaggctggaacagtctgaagggctcagaagaagacaggaaaacgtgggaaagtttggaacttcctagagacttgctgaatggctttgaccaaaatgctgataatgacgtagacaataaagttcagactgaggtggtctcagatggagatgaggaacttgttgggaactggagcaaaggtgactcttactatgttttagcacagagactgggcagcattttgcccctgccctagagatttgtggaagtgtgaacttaagagagatgagttcaggtatctggcggaagaactttctaagcaacaaagcattcaagaggtgacttgggtgctgttgaaggcattcagttttataaaggaagcaaagcataaaggttcagaaaatttgcagcctgacaatgtgataggaaagaaaaacccattttctgaggggaaattcaagccggttgaggaaatttgcataagtaatgagaagttgaatgttaatccccgagacaatggggaaaatgtctccagggcatgtcagaggtcttcatggcatcccctcccattgcaggcctggaggcctaggagaaaatggtttcctgggctgggtccagggtcccagagctgtgtgcagcctagggacttggtgccctgcatctcagccactccagctgtgactaaaaggggccaaggtacagctcgggctgttgcttcagagggtggaagccctaagccttggcagcttccatgtggtgttgagcctgtgagtgcacagaagtcaagaactgggggttctgaaaccacctagattgcagaagatgtatggaaaacgcctggatgcccaggcaaaagtttgctgcaggggcggggccctcatggagaacctctgccagggcagtgcagaagggaaatgtggggttggaacccccacacagagtccttactgtggcactgcctggtggagctgtgagaagaaggccaccatcctccagaccccagaatggtagatccaacgacagcttgcactgtgtgcctggaaaagcctcagacactcaacaccagcccatgaaagcagctgagaaggaggctgtaccctgcaaagccacaggggtggagctgcccaagaccatgggaacccacctcttgcatcagcatgacccggaagtgagatgtggagtcaatggagatcattttggagctctaaagtttgactgccccactggattttggacttgcatgggccctataacccctttgttttggccaatttctcccctttggaacaataactgtacccccattgtatctaggaagtaactagcttgcttttcatttttcaggctcatagatggaagggacttgccttgtctcagatgagactttgaactgtggacttttgggttaatgctgaaataagttaagactttgggggactgctgtgaaggcatgattggttttgaaatgtgaggacatgaaatttggaggggcctgggcggaatgatatagtttggttctgcatctccatccaaatctcatcttgaattgtactgccataattcccttgtgttgggagagggacctgatgggagataatttgaatcatgggggcagtttcccacatactgttctcatgatagtgaatatgtctcaggagatctgatgggtttatcaggggtttccgcttttgcttctttctcattttctcttgctgccaccatataagaaatgttttttgcctcctgccatgattctgaggcctccccagccatgaggaactgtaagtccaattaaacctctttttcttcccagtcttggggatgtctttatcaggagcatgaaaacagactaatacaacaggattggaacccaggtttcctgaccctcaagatgctgggcaacgtgttccttccctcagaagccacgtgccgtagactcctccatctgtgccctggactgggggctgtcctgctgctgcacacctacatgtactgtccttgagcttataattgggtggccctaggaagtagtgggatagtaggagcagttaagaggcctcaatgctggaggtgaacaggtgggatttgggtccgggcatcattatgtaggagctgggtgaccaggggcaagcaccttagccctccggcactttgctgttcacttttgcaaagcagagatgagtgctttggccttagggctgtgaagtttaacagtgttaaataatgcagaagaaagcaagcatcccacagatactactgatgacaataacacagctctttctttaacaaatgatggcttaaaaactaatcctggccagcatgctccaatctagagagcgaggttttgtaaacctgatcctcaggtgacagcagtgtctggaccagcagggctgctcacaggagtcaccgtgccaggatcactgtgctggagcaggcctactcaatcagagtgtctgggctcagctccgaggtcttccaccatgcgcctcgtgcattttctacacagagaaaagtgtcaattggcccaggatattgatgggatctgtgcagagatatgtgagggacaggaacgtcacagcttagaaacgcagtttatgagattctgcatttaaaacccaccttgactcaactgcactcagagagaccaaaaagcctctgcattctatatttcacatttagtgagaaggcccaggttagaaggaaacagtaagtctgatgtcgagcagcatggaaaacggaggatcagtggatcatgaaaaacaagccggaatgagaaggcgtgtcagtcaagacagccccgagccaccgcctggccgtatctgccaaaggggtttgtgatcttagacaagtatccgtttatgctgtttagaaaacaatctatagttgtattctattttctgcattcagctttttttgagtgccattatgataaaatgtcatgttattataaaatttgaagttataataaaatccaggttgagatgggcccaacaggtgcgacctgcattctgtacagaatgctacagaattcttggctgctcgggcccttcctggagtggtgctggcctgtcgcccacaggccatctggggaggaagaaatgtatgcaagaatgtcatgcttccagaggtttcggtggtggcaattctactgcaattattaaagatacattgttacactggctagttacaagtgggttatatttaaacaaaatttggagaaaaatgttaaataaaaaatgtttccaagcacaaaattgtttttggagaagatgaacatcctacgtcaccatgaaactggtgtattcaagattcaggccattaggaaacgccatgtgtcatgttacaagaaggaagcagcctgtgaaaagtgtcaaccgctcctttggcagaagaagaccagtgttgtggtatttaatgtcgctaaatttcacgatttgacattttctacattttcctttttctaagatctaaagatcacattattgaaattttatctctaaagaatggacctcttaaatagtcctcttttatgattatgcaaataactcacatactgttttgagaagaaaaaaaagacaactaaataatctgaggatagttcctctgttatcccagccaaaaagaatagggaatgcatagtgacaacaccttcctaactgcgacctttagaatcacggcacttcatcaagttcagcattgaacatgcttaaagggccgtctttctatgactcagcccggaggttctggagttgttgcccccatcacagtgggctttgggcccccgggcctgccccttggttctaatgatcagggaggtcctcccttatgtgcccactgaacttccagtctcaggctgactcacacaggacacactgtgaaaagctggagaggaaagggcccaagtgacacagtcacccgatggctctcagggacctgagggccggcaaaggtagaacaggtgtccactaagcctggagcgtagcctcaaacccactgtgccaacacaccctgacttcagccatagtcccgtgcatatccaaaggtctgaaggaaacttcagaggtgtccagtcttttggcttccctgggccaccctggaagaagcagcattgtcttgggccacacataaaatccgctaacactcatgatagctgatgagctttaagaaaagaaaggtgagtgcataaacctcataatgttttaagaaagtttacaaatttgtgttgggcgacattcaaagcccctgggccacgggttggacaagcttgctctggattgtacccagtccatgcctgtcattgtatgtgatcaaactaagcaaaaagacctgattttcagtctaccccacccccaacccctgaccccctcagtgggtccccagtgaggacggatgagaccagaagtcccaatgagcccagtgtgccttgtgtccctgggggaaccagacccgattggacacggactggattttcatgcgtagggggcggaggaaagggaggacattaaatctttaagtggttaaagacacaaaacccacaggaatgatttctaatgaacagaaaaagggctgaggaatttttcttttcttttcttttctttttttgagacgaagtctcattctgttgcccaggctggaatgcagtggcgcaatctcggctcactgcaacctctgcctcccaggttcaagcgattctcctgcctcagcttcccaagtagctgggactacagacacaccaccacgcccagctaatttttgtaatttttagtagataggggttttgccaggctggtctcgaactcctgacctcagatgatctgcccgcctcggcctcccaaagggctgggtttataggcttgagccactgtgtctggccagggctgaggaatttaatattgcacatacatattgtctatgattctttatgtgaaaatccactcaaacatccactctgcttttgacagcatcagcctttctcatgacaaaaccttcccctcagggcctatgcggagaatgccgacagcacctgggctccagcgccttctggggcctaggcctctctacacccacctggatgcgcaggtcaaagtgctttgcttctcagggagggaactgacgccccgctcagcccttccttctcctacgctccactgtcctgagggacttgatgtccaagtgctcaggtgggttcggcattttccacaaacccaaggaccaggcatggcagcctgttgaggccaccgagaggccggcttcgagtatgcggggcagtgggtgggtatttcgctgtgtccattttccttatattcactttctatttgaatgacagagaattatacccagaaacagactagtttagatttgaaagcccttggaaatcaccacttcaaatgaagacccaccctgggcgagatggggagggaacacccgctgggcaggagggcacggggagagggccggatggggtggaatgcccactgggcaggtgggctgggcaggagggcacaggaagagggtgagatggggtgggacgcccactcggcaggtgggctgggcaggagggcacggggagagggcgggatggggtggaatgcccactgggcaggtgggctgggcaggagggcacagggagagggtgagatagggtgggacgcccactgggcaggtgggctgggcaggagggcacagggagaggtgagatggggtgggacgtccactgggcaggtgggctgggcaggagggcccagggagagatgagatggggtgggacgcccactgggcaggtgggctgggcaggagggcccagggagaggtgagatggggtgggacgcccactgggcaggtgggctgggcaggagggcacagggagaggtgagatggggtgagatgcccatgggcaggtggggtgagcaggagggcacagagagggtgagcacagtggccactgaaagccgctgagccgtccatggagatctgaactgttgagctggcttccggtggcatgcactttttgaaataaagccttttcatttgaccatgaatgtgttcaacaaaaccaaacttcttgggagagtgaacatgtgttaaatgaccatatactaacccatcacgctgactgttcacagctgctcaccaccatgacctcattagttgggcggagatgaatatgcagccattttacgatcacaaattacattccacaactgaaatgtagcatggagctctgagagatttttcataaatcacaagttttatagtatgcaatgaatttttatcaaattcataacatagatgcatacatcttattttggaaaatgaaatggcatttattttctccacagaaaaagtgccaaaaaatgggcagtaataaaatttccattattcaagaggttagatatgatttccatcttgactgaaaaagccagaacgctttgaaagaacttcttttaggggttcttatgtaagaattgctattatgcatccaatgtgcagaggaagaaaaaacaaaacacaaaaaaacctcttgaataataaaagctatggaataaagcagtataataggttggttttaaaacttaaatatttttggtaacttgatgtggataataatttgaagatttaagaaaaataactcactatattttttaccttccacattttctcctactttaaaattcactcactttgtcttgacttggtcgttgactgcttttattcataattcacttgggataaacagacttgaagcatatacacgataattatttcaatatcaattctaataaagacaaagcagtttggtaagttttactcgcattcgcatacttttcaaggtatcatattacacataattagatcctagaaacaaccaaattgctacttgtgagctaaaagtgctgaattcttgcttgtttagaaagcacactgcctcatccaaggccctgatgtccagctcaccctagggtctagcactctgcaccctgtaggacttgcaccagagatcacggccttcttggggcaaaccacagcactgtcgctgtgatctgcggaaacggctccctccactttgcctcctgtgagtcttggtgattaaattgttgagcaacttcaaagcacagaggcgaaaaccaatgggaagaagcagctggtggtggagagcttaagcatcctgcgcaccttctctgagctctggccaggccgtgctgaaacactgcggaagtcatgtctacaccagggttccccacccactgtccagaggtgacaaaggagagacgctcctgataaatgtcttcacgtgacagtttgtcattaaaaaccgaagctaagcccactgaattcctgagtgcttattaaagcgccaatggccaaaagagacaagactcacaagactgtggctttctcctctggatggcagaagacgtatctcacttggcttgtttcagtccaggaggcatcacgccaaaggaagtactatgccacaggaagaaatgtgcaaactggctggttctcacgtttttctacagcattttacttccatgggttctatctaatggtaacataggttagagcaaaacacagtcaacacagttgctttagctcaagtaatttcatcaccttaccccatagtgatagtgaccctctaagggtcaacaaaaaggcgcatcttaaaatgtattttatagctctggtaggccaggtgtgcaacgaaacaaggttaataaatttaaaatgccttggtgtgttttgctcctttcttagtctgcctgagctgccataacaaagtactatggattgggtggcttacaaaacagacatttatttcccatagttctggaagctggaagtccaagaccaaggtgccagccatttggtcctggtgagggcccaattcctggctcacaggcagctgcttcttgcagcgccctttcgtggtggagcaagagctctggtctctcttcctcttcctctgaggacactactcccatcgaatcagggccccaggcttaggacctcacttcaccttcattacttccttacaggccctttctccacatagaatcacactgggggttggagcttccaaatgtgaacatggagggatacaattgagtccattaacattccatcccttatttgtagtaacagcatgaccatactcagtgatgacagggacactctaaatgtcaacatttacatcttacaacactttttatagctctattaggccagttatgtcatgacatcacaattaataaatgaaaaatgcctgggcattctggggatactcagcagctctccagatgttaaggaaactcagtataccccaatctggtcatttctatctgtgattgtgatcttttgcactttattttatagtaattttaactgaaatttttaacggaaacaaaggagctacgctgtcatgccaagttttcagtaaatacgttgaggagctgtgagctcagaaagcgttccaatagaattcatttctcatggagagaccatgattgatctatttgaaatgcaatattggtccagaaactcagaaacatttggtggaactcagggtttacaataacaacattagctaaagattcaatctggacctattttaagatcccgagggggtggcacattggtgtgtcattcccaagatgtctcaaaacacacagcagatttctgctgtagcaactagtgtgagaaaacccgagagcttcttggtcatctttgcacctctgagtgctgagcacacgtgtggtgacgatgttgctacaacgatgtggggtgcaggaagctcgagtttcaaaagaagatcataagtaacacatttttccttctagccagaatgccctgaaatacatgaaaaaagatgcagctctggctacgtgaaaaagaggtagtgagtgactcggggctgggaaacgaagccgtcctcgctgggatggactttcagtctcacatcttcagcaactttagcttcttcattatgactttttttctcttgaagattaaggaatcgaggattgctgacatgtctgtattgattagttatggttctccactatgtttactgccatcctaattacagaacctaattttcacatttacttataattgtgtgcaattgtccaggctgatcttttaaggttaaagagaaaatctcaaacatgacatcaaacaagtctttttttttttttttttttttccttattttacagctttattactgatttccctctaaaaagagactcaagtgtggagctgactcatctatagattaaggaatcacaaagtaccatagtcacttaacaaatgcaaaaaaaaaaaaaagcaattgttttacctttcaactgctgatgttatgtacaatctatcacaaaaagcatagctgtgcattcatgagctgattatatcaacctctagaattttagaaacgagcacatctaagcatatggatactctcttaccttacaaagtaaaagcattttctattttaaaatttttatttctgtgtaaaacaaagaattcctagaggtcaaataatataccaaacttaaagcactattaagtcatgaaacaaagaagattctgaggtagaagtcaagcaatataatccacagtttcaggtattcccagcaaccatcgcatttcgcaagtaagatctattttttttaaagtctcaacttccaaaaaatcaataatccattctgtaaaatcagatgtaaaactatgaccaacagaagacacccaaacttttctcatggtaacagagtaaatgcttttactaaaagctgccaacatttctatcagtagtaaccgtaaggaggccgctggttgtaaccataatgtccatattgctggggatagtaaggttcttgtctgtgttgcgggtagttgttaccccaggatcgtccatgccactgattggatcgattgtcacttggccacccccatctgttgtccctgcctctgaactgtctgttgtcttgcaaccgattgcctctgtttctttggttcccaccagctctgctattccattcctcaacaattggaggagactcaggagggcgtttcaggtattcctgatactccttgtcattttctgtgaatctactagcaaacatctcttcaaaatttggaacagcttcggcagtgtcagtcattctgaaaatcccaaaggtttgaggcagctgtattgcttaatgtttaggttgtttaaatccgccaagggctatgtctatccagctcaggccgaaccccgccggcgagacactgagaagcccaggagaggtggcctctggtccactacaccgtggaactccagaccactccagttctccaatgtaaccgagcgccttcctctccaaacaagtcttttaataaggcccatgaactagtccatatatataccagaggaggaaagaaaaagaatgaccacagtttattctgaagacatgacaaaggtaacacacatcagttatacacaaagtcaaatttcagcattacctccagggcagagggagccaacagctttcagaaatctctgctcctgccatagactggggctcccctcagctgcctcccagtggggactacattacccagccctccttgcaggcaggtgtggtcatgtgactagccctggccaatggagtgtgtctggatggtgtaccttaaagaagcaggtgcttctttcatagtctctttccccccacagctaactgcaggcccttagggctggtggagctacaaagaagaagcctgggtcccccaaatccccatgtggaagcaaagtggccagtcatcaggaaccctgacattagactaacacataaggaagaaataatttttcttttatgaactcagggaaatattttcctgaaacacaagagtgcacagtccagagaccctgggtcagagccctacaggcccaagaaaggcttggttggacactggcatgggacagagggaggcaagaaagatgagataagcacagactagagattcgtatctgcttttcataagtacaagagaaatgtaccatcaaaatcagttctaatcaccgtcactctaattgtgtggcatcagacaagctcctcacccgtccttggcctcagttccctcctatgtagaatgagggggtcctacctggattagtggttgtgagaaataaatgaacccacgcatgtaaaactcccagaacagtacctggcatagagtgggttctcaaaaataacactttagttcttcctgaatatctcatgcagtgatataacatctttcttgaacgagtctgccctttttgaagtctgccattggaaaaaaaaaagcaaaccagcataaaataaatattatatatatatatacacacacaaaaatgtaaaatatataagtggattcagaagtagaagatgaagggcccacgtctctgaaaagccacagctgaaggcgctgaaactagccgtctggcctcactagcacagtgggtagagtctgacttcctgctggctgctgtcattcatggcaggactttccgggactgtgcgctctctgccctgtggggaagaaccccgaggaggtgagagtgagaccctgcgccctcctcactcactcaggttccagccacaacagtgaatttattttgttttttatctgtttggcttatcacatctgaatgcaaaatatgcagcataaaatgaatgaaaattgagaccccagtgatggttagagaattctcgtatcatgaactaaaagtgaacttctttccaagaaacaggggaccttcgttttgctccccaatgtacacactgtgctggggtctgaagtaaacaaggcaggagctcagctccatcccagggccctcaccctccactgctccctgagtgtggtttaaaaagaggaacaaggacctccacaaagtcagcttcacattcagcaggtggacagcagaatcaaatctctgcaaagaaacagcctatgagtgtgtgcagctgctcacaggcctaaattataatttccaggtggggccagcgagttgctgcaggggtggctttctgcagaaaaaatgaggggtggctgaactggattccacaggccctagccacacagagcatcatgcacctgaactgggggtcttaggggactcctcttgggcacacgacatccctttgctgcctcctttccacagggaccctgcgctgggaacttgcagcacgtcgctgagacaccagaatctggggaaattctgcctgtccccaacctctcgctctggctgattttgccatctaatttgtagccttgcatgtacataattcctatttgtacagaaaaacaatcaaaggtggaactagatcgtctgatctcaactccagaatgtgggctttattgctgccctgtaacctggggctgctactctgccctgatgatggacacagggttcccggaagctcagggcccgaagagagtccagctgggcagtcgcacatgacagacagggtgcggcagccaatggccctccgtgctcactgtcaacccggccagcagaggccatgcataggtggccaggtgcgactacctgtgttccagcaagtagatggaaaaggaacactgtcgctttctcagggctgacttccaaattggggggaggaggagtgggtggttaagggcatctaggaggtgggtggcaagggagtgcccccgcagaaaaggaggaagaagctctaagcccttgatgagtcagagctgaaattagtaacattggggttgccactactctttcaaaatttaagtcttttataaaagagccccaggctttctggaaacaggtggtcagattgaaataaaaatgatggctatggggccagtctcctcctaccaccagcaaaagccaaaagtgaatttatgtttcacagccagtgtggagaaagcgtctgctcaacagctcaacaggaaaccacggtgcattccagggcccctcctggggttcctttgctcattttcacataaagaaagaaaaaggatgggaagtattaatctgcagcactaagtatgcacttttgtgagcacttgttctaaattattgccattacatatccacactggaattgaaaaataacccagctcaattcatcggccaaagacacccagcctccatggtcagagtatcttctatgcccgacaggagggactgtacccttagaattgaaatcagttgaaatcagtcatgcttcatggaaggctgcataaacaatgtcattctacccttaggtattttaccctcattaagtcgcagaaaataagagcctaaagggaaactgggaaattgaactttcagcttttactatcagctccaatagagactgttggtagaaatgggcgcacatcacctgtgtctccagcatctctgcatgaaaaacagagcgtggtctatcagtcttacagaagactctcacccagtgctttggcccaaacaaatcagatttgttggaaacattttcaaaatttctaactcctagatttgatatacaacataaactaaactgtggcatgaacagaatggagagagacttgggatcttaccgggagacaagatcatacccaccaacccaacaaatgaggccacaggcatgcaagtgagatacacagaaaacaagaacaggaagggccagaggaagaagggcccctgggcagcttgattggggtgctcagaggaggaggcaagggaactggggggaatacagacggtgctgtggagagggcattcaaggtgaaataaaacagctcaagcaaagacacaggggctggaattggcaagcatcatcgggatgataaagactaaatctatttgattagagcagccttctggttttgcttcttttgttgttttgcttatactttttgcttaaaacttggacatagtgggaaatagaatcagaacagtaaattactagttcctacatcagtaggctttgaggagcaagaacctactaaacgctgataagaatcagtcattagggtctggcagatacagcatccacgtaagattaagttcacagattcccagtgtgaactccgtgtcagactctgctttaggaggagacagatcctatttcagggctgggcacacctaaagatggagcctggcgaggagcatgacttagggtgagaaccatgccatcagcctgccccagaagaatccagacatgcagcagcacaattgaaatcctcattgaggacttcaggtcgttgcactgtactatacaggggattcgtgtggaatgagttgattgctgctgctcttgccccacaacacacacacgcacgtgcataactgaaagcacgtctatgttaatgggctttcctgcagtaaccttcttactatctctactcatttcccgttgcatcatgtataccttaaacatacacaataaaactcattttaaaaaattaaaaaaaaaacctcattgaggcagtgagtataatcaacactaacggataagtgatggccccaggcaaagagcataaataagggaacggaagagatcatcaaagacacgacttagagtaaggccttgctggatttaaaaacagattaaaaccaacccacacaaacctttgcaagtaaaatggatctgcctgccatgtcacagtcaatgaagagtcaaatctgagcattatttaattacaagcatcacaaaagcagaaaaacaggttgtctcggtctgactttagaattctcttctacatattaaatgccagaagatgccagagagcaatgttcactgagcatcaggtacaaaaaggttgcagcccaggcatttcacagtcgcccaggcactcttcatagatgcaggtgatggaaaaggccagcgtgcaaggactcagcaaacacaccctccacgggaggccctgggggcacctcggaaagatgttaccatcattcaacgcgaccaacagtgccacactggagtgccttctgggatgagcagaatgcctttagaccagtcacagtgtggctgcttccgtccaaatggcgctcggcatgggcatggtttgatgtgtgccccccacccctgaaaaaagacgtgttgcatgtcttgacttggaaacatgtgacttgacttggaaacaggatcactgcaaatgtgattagttaaaacgagatcacagaggaggcgagtggccctaatccaagatgactggatgaccacctaatccaagatgacttctaaaaaggccactggaaagcagacacacaccaagaaggcggccctgagatgatggaggcagccaaggagtgcctggggccaccagaaaccagaaggggcaaggaaggatcctcccagggcgttggagagagcttggtcttgcccaggtatagtctcggaaatccaccctccaggactgtgagagcataaactcctgtcggttaatcccacctgttcgaggtagtttcttacagtagccccagaaaactaacccagcatttagtttttactaaaatctcatcagtgtacccaccatggccaccttcaagcctgtgtgtattacacactgagttccacaagacagaaggctgtggacaacagcccccaaacccaagccggcccacactgatggcactggctgggcccactgtacctgcagaagacagaagcatctgcaatacagaaatcactcagagcttagacaatgagaaaatgatggacgttctgtttaaaaaataatcaccagccagggcgcagcagtgaaccagaaagttctcagaagtcctgaaaagtgggcaagagatgggcctggcttgtagagaaagtgacttcaccaaataccagcagaaagagaaagacttctcgagggaactagagagtcacatattataaatagtagcgagggtcatggagaaatcaacaggataatgaattctctgctctatgtggagtcctggcctgctgagagcttctgatgggtgcacctcagattaaaaccagggaactcacctgcggggaagagggccccggtgtggtgctgtgaggggctgacaagcccggcctgtcctctggatttacaggggactacttattcacccaatctatgggctaggcagaatctgtgaatctcactttacataagggaactaggaggtgagaacttactagttattcttataactaataagtgaggagctggaatgtgaacccagaagcccagagtcagtgttggtgaccattctgctgtaatgcctgatacgtgaggggaagaaatcagaatgtgaatcagcgcctgtccttatatcaggcccggattgatgagagggacagaagcacagaaagggacgggggagggcaggcagggcagccaccgcacagaactgtactacagcgcttcacttccaggagagcactcctacctgcccacctgcggtctgcccttacattctacagggcaacggctcttggctatgtctactgtgactcaaagaacaggccttcggggaaacagatcatgccagcgatctatcctaattatattcctaattatattccttatgaatcaataacaaaaggatcattagacatcggagaccaaaaacatcagcacaaaaggttgaaggaaagtatgtttgaaactcgaattcaacatcaagctgagacagttctcacaggaacaggacaaacagacgtgttagtcactcaagacctcagagctcaccactgatgcaacctcgacagacaccagtgagcaaaagagcagttcaggagaaaggcgcaggacacagcagaaagaagctttccgatgcagtgtgagcaccaaagaaggcggcatgaagtcaaaggagaattcaggggcccttaaatcccaatcaaatccccaacatatacttttggattctaagcgtttggaagaaaaattctttataggtaataccagagctaaaagagaaacagaacagaatacaacagaacaaaatagaatagaatgaaatagaagagaatggaatggaatggaatagaataaaacagaaaagaagactatataaaaacagaacatttgacaaaagtagtatttcagattgtgggtaaatagctagttctaaaaccatatgctggctcacactacagtcaactggaattattgtgatcaagtgttaacagagtaaaattataatatagccagcacagtacaggcaaccaggtccacaaatctcagaatggtatcgatttttcttatgcaggtacaacagcaaagagataatttataaaggaaataatttatagatttggttacattaaaattgacgtgcgtcaaaacattccattaaaaaatgtaaacacaaactggttttcggaaaaaaaaaacttgcaaaaggcaagagctcttaatatataaagagctcttacgaatcagtaaggaagacaaatagttcaattaaaatggcaaaagatctaaacaggtgattaacacaatcaataaacatatgaacaaacttcaaactcactaatacttaaaatgtatatttttaatgtgtcaaacttctataaatgataaaatgatatcaaaaattctgagaatataggagagtaaaaatctcagataactcaggtaacactatcacaaatgtaaatgcacagaactattctgttcatgccattgacctaacaattccattcccgacaatttaccctaagagaataaaagtgcacggacaattctgtgttcaagaccgttcatcataggggttttagtaatataaaaatcgaaatgaatttaatattaaaatatatgattaactaaatacagcttactttatttgatgtgtgaccattatacttgtatgtgtggaatatttaatggtggcggtaaaattctgaaaatgtcttggtaagtgatatgaaacagtttctagaaggtgattcaaatttttaaagaactgcacatatgtatacatgaagaaagaatcagaggaaatcaaaaatttaacaagggtcattctaaagtagaaaatgttaaataatttgagtttttaaaaatttatttccctcataattttcacaataaaatgtgttattttagtaagcagatcaaatatcttattaaaaaaattgtcacgtgaaaaaacaaaacaaaaaacttgtctgtccaaacacattttcttttttttttcttttttgagacggagtctcgctctgtcgcccaggctggagtgcagtggcgcaatctcggctcactgcaagctctgcctcccgggttcacgccattctcctgcctcagcctccccagtagctgggactacaggcgcctgccacgatgcccagctaattttttgtatttttagtagagacggagcttcactgtgttagccaggatggtctcgatctcctgacctcgtgatccgcccgcctcggcctcccaaagtgctgggattacaggcgtgagccactgcgcccagcccaaacacacagatttttcaaagatctgtcctaaactatcactttcatagtgcttttctgctataaggttctcagaacaccaaagttctttccatccagtatttactgagatgcaaagaaacaaaagaagtaaaaagataaaagaggcaaaataacataatggaaggagatctggaaactgggtctgggattctaacattagtcttgaaattaactggttctgtgacctaagccaaagttcttggtcttggttttctcacccaaataaacaaagaagttgaaatgaataatttttttttgtttttttttgagacagagtctcattctgtcatccaggctggagtgtgatggcaggatctcagctcactgcaacctctacctcccaagttcaagcgattttcatgtttcagcctcctgagtagctgggattacaggcacataccaccacgtccggctaatgttttgtattttagtagagactgggtttcgtcatgctggccacgctggtctcgaactcctgacctcaagtgatctgcctgcctcggcctcccaaagtgttgggattacaggcatgagccaccgtgcccagccaaaacgaataaactttgaatgcaattttgtaccctaaagctctatgatgctatttcataattcccaaaaagccaagttcaacgacagcaaagctgcccagggaagcggttgtatcctccacccgcacagactgcggctgtccactgggacttcaatccccagatatgcttgtgattggaagccctttttcctctctgaaatttcaaaaggtgctgcagtcacagctggttctattttgccactgacaggcagacacatatttttatgcattagtaaccttaggaatctcagcccctcagtgatgtgagtcaaacaaacacatttcatgtttctaaggagagaatccagtctaatgttaaatgatcttaaggaagtcattctgtccttacatgatctaccagtcaaggaagacaggcagaaagatataaaagaataaggatgggtacacataaaactacttggaggaaaactcccttcaatgtattaccaataaaggaatggggttccctcatcagtcagtcctgagccaagcaaatccaagcctggtcagaggccaagacctctgaaagagaatggcttttagaacttattgtaatagtatccaaccagttttttaaagcttaaaataagatacacaaggtttggatatggaaatctttgaagagtcattggtatcttatctcacagaaagggaaaggctttcaatgggtttaaaatatgtgacttgcactgtgatgccaggcaaactgcactcactagagttgatgtgcaggaggtttggaaggcggggcggcctccagacaggggtcacaggccatggggaagataggcggtaaggtccacgtgatgatcaaggaaggaggtcggtttgagtttatggtcaataatactctgtgtgatgattaatactgactgtcaactttactggattgaaggatgcaaagtattgttcctgggtgtgtctgtgagggtgctgccgaaggaggttaacattcaactcggtgaactgggagaggcagacccaccctcaatctgggtgggcaccatctcatcagctgccagtgaagctagaataaagcaggcaggagaagatggaagagcagacttgctgagtcttctggtcttcatctttctcctgtactagatgcctcctaccctcgatcatcagactccaagttcttcagtctttggaatctaagacttacaccagtggtttgccaggggctctcgggccttcgctcacagactgaaggctgcactgtagtcttccctaattttgaggttttgggactcagactgatccaccactggcttccttgctcctcaacttgcagatggcctatagtgggactttaccttgtgatggtgtgagtcaattctccttaataaactccctttcacatatacatctatcctattagtcctgtccctctacagaaccctgactaatacactctgtgaggaaacactgggcctgaatatgggagacaaacagggtggggggtttccaccactgaaatctttactgtgggaccagcagagctgtcccaccgtggatggacaagctatgtaggggtgagggggatttcgaggggactgtggtgattcaccacagatgcgccagttgggagctgcagagagaggcctgggtgatgggcacatgtgatgtcaggcacagtcatgggaacagatggagaaaggacacggggaggggccacagatgctgagaaccagcccatggtgttcacccacgaaaacgagaccaagtgagatggagagaaaggaaaagaaacaagatagtgcacgccatgggaggcaagagaggggcacaggtggctggggacataggctacgggataagtcgaaagaatggagtctctagagggcagagctggtggcgaggcaccccgtgaggccccaaaggacacagcccccgaggacgaatgggactcaacaggtggagacagctcatctctgaggaggtggcagtcactgaagggagaaaaaaaggacaagagacaaatgtgaagccaacacctggcagccaggccatgggggccatttgagcatctctacaggacacagagctggggaaaaggacggcagtggagcgggtgctgggctgcagggtggaggaggaactggcttcagaaggaggaagagcatctcttcttctgggaaaaaaggtaggaggattggaataaagatagaggagacatttaacacataaagaaaacgtaagccattttggaaacaatcgttctggaatgcaatgatcatggagctgataacatgcaagattgcagctctaatagacactgtaggcaagccaaaattttcatgaatttttcatggatttaactagtagcctcaaaatgaccatttcatattattaaacatcaagagacaagaaatatccaatgggtgacggcatcatcgagaagagaatagaaacagatttccggagtccacgggctggtgagatgctctagagagcaggactctgctctctggtgtgccagccccagccgggcaccgtgctattgttggttttcatcacccagttcctgtcagaaccactgcagtcatgccacagacagagcttttgtgcaaatggtattttcttccctattaaaatgttctactctgttcccatctaaatgggtccaggagcagtcccagagacacctgcaaattgcacagaggcatggtttgatttcacatgctcctgatgaccataattgttgctattattttccttactatttcacctctcaggcagaaagtaaacaaaacacttctcaggagagagcggggagaaaggaagagaagacattgtggggccaaattggagcacaggacggcatttgttgaaccgttctgatttcctttgatgctttccctccctgctgttcaggataatgccttgttctcctccctaacttggtgtggaaggaatccctccaaaaggcaatgggggcagacagaccacgcttttattttcttataggcatttatgttcttacaggaatggtttagagaggcttatggatgaattaaatggtttgcaaaattaagactggattctctaccaagtagataggcagggacaataaaggaataaaaagccacatttggagctaatggcattgcaaaaccaattctggatggagaagttggaatcagatgaccctctgaacttgaagacatttggtgaaacagcctggagtctgcccatcatgcactgagtcacgggtggttggtgtgggtagacgctctaaacattttggctctaagcgcctctgtttatacaacattctttcccgttgcgtcaggaataggaagcctgttttctctgagataatggagtcaggaagagaaatcatgtcccaactctggtagattttgtggcagtccaggaaacaacaaggcttttctttgtataagcacacagcaccgctctttcctacctcccttctttcctgcctccatccttgtattccacagctgatcaggactcagctcatccccatcagacacggctcactctcaagtggtcctccaggtggggttgaaacagtggggtgtccgatgcccaggcagggcccagcccggcctgtctcaggggttactgctgcttgtccaggtctgtaactattgtcccaggttcggtgatcaaaatctctccagataaatttcatcctaagaaataattaaagaatccagagcaggagtcacctggtgcgtgccatatgtaaacaaccactcttgaggatgtttgaagaagcactggattggtatcaaggactgaaagcaggtagaggtttttagaaaggtaaattctgctaactacagacagggagattggaaattagcttgacaacgtcttagggaggaagcagtgatcaacaataatcaggagagtcatatgaaatatgtgctgatttccttctctcctctgatgaggttaccagatgggtaggtgtggggaaaatggtaaacagtgtctctggttttcaggaagaatttaacaaggttttctcattatatacaccgaataaaatgaagaaatgatgactggcagattaatagctgcctcaaccaaagggaagtaattaagcaatccatgtcaaccaagaaggcagttctgagggcaccctcctggctagctccattcagccttctcattagcgccaggggaagcacgaagcttcatgacacggggaagacagcaggtcacttgcaggatgatgggatatgtatctctaaaaataccaaccaacagacgcatgaatttaagaacaaaataagagacataaatgcaacatcttactcttattaaacaaaaaacaaataagctgtagggggaggggccagattagcaggagtgttagcccaatatgcgctcagtaatgtgaggatcgtgttaagtgctgggagaaacgacacaggcttctgtgtgcatcttcccaaggcaggtctccttcccactccatctccatcctccatgcgtcactctcaaggcctagagcagaagccaccatctccctgagccctgcctgatcacctccctagagtagctccttccgtcatgatccaagggacacccagcctcccctcctccgtatatgggtgagggtggtaagtttgtttgtttgtttgtttgtttgttttgagacagagtcttgctccatagctgaggctggagtgcagtggtgccatcatagctcactgcagcctcgaactcttgggcccaaacaatcctcctgcctcagcttcccaaataggtgcacctactataggtgcaccaccacgcctggctaatttatttttgtttttagtacagacaaggtctcactatgtttcccagaccagtctcaggagctcacgtgatcttctggcctcagcctcccaacatgctgggatgacaggcacgagccatcatgcctggccaaggttactgtttggcatctggcttcccaagtggaccatgggctccaagggcagagacgatgtctgtcttattctcagatgtttagccaggcaatgcctggcaccttgtagaaactcaatcaaggcttgctcagtgaagataaatgaatgagtcaccaccatcagatgtgattttcttccgatctaaattcacctggtttccctgtttgacacactgtcttgggaatttggaaatatcccttattcctgatgggttttgagatcctttagtgcaggaagtccacctgattatctttgaataagaacctacgagagtctaaaaactggttgcataaacaaatgggagaagaaaacactaattcttttaacatacaagttgttgcacttgccctattttcaggactaaataatatagctgcatgtagcgtatttgaagtaaaatgaaatttcagatgtgtagaaatcagtgaaagaagctcattgcacaaagtgaatagaaatggaaaatggaatatgcatgcattttgaaattggtcttatcaaaatcagtaggaaattaaattttaaactcagtcattcttattatattatccctattgaaattcatcttgcttttgcctgtaggcagggagcaatttattaaaatactctgcatatccaatatttcttaaacaaacaaacaaaatctcttatactcagctcaaaaagatggtgacagatgaaggaagaattagaagtgttaaaaaaagaagaaaaagaaaaaacaactaaccacgtggcctatcttagaacctgactgatgattccattcagataatatttcttgggcacccacaggccacaagccacatgacattagatagagaaaatgatagaaatcaagccatatttctctacttgcaagcaagttatatactagcagatacatacaatacacaaaatgctcttaaatccaaataaatcacattttcatgatgcaaatactgacagcttaaatcgacatagcactccattggttacaaagcacttctacctaaaacatcttatttaatttgaaagtaagttaatctagttaggttaaagagttgtgtcaatcgcaagttgtctccaaaagctacctggagcataaagaaccaagaagagctacgacaatattgagaaaacccgataagataaaggtaggagagacttgctgtattagctatcaagacttcttttaaactgatggttaataggacagtgtggttttgacataggttagacacatgaaacagaatagagccagaaatactccatccttatagggaattgtgtgaattcagaagtgcttgcaggtaaatggagaaaggatgaacaacacaataaggggcactaaaaaaattggttatcttatttaaaaagcagaaaacaaaactagttccattctttacactacacaaagaatgcaagtcattaaagaccaaagcgttaaaattaaaactttaaaaattttagataacagatcacttttacaacttcagagtgaggatagacttcttaattaagacacagaaagcatataatgtaaagaaaaggatgaatcaattcagctgcataaaaatttaaaacttctgtataaaaaagtttaaaagattggccacaaacttgatagcatttacaatgcatgtaactgatgaagagttattatacagaatatgtaaagaactcttataaattaactaaaagaggcagagaaaaggagaacaggaacactgtatagatggggaacgcaaagagaactatcaatgcccctgacatgtgaagggagtctgaccacactggccatcgggcagtgcgtgttccggccacggtgggacaccatctcacacacagccgatgggctgcgactcagtgcctgatgtcctaccaacagcaaggagggagagaatgagaactcacatctactgttggtgggaatgcatcttatacgacgactttggaggaaatttggtaacatttactatagttgaagatcgtgtgctccatgacccagcaatctcactcccaggtatatacccgagagaacctcccccaacacctgcccctacggtgctcaagggatggatgcacaagatcattcatggcagcactgctctcagaaacaccagaaggaaacaacaagcatccagccccagggcaactgacacaggactgttggcacagtcagatgaaataccacgcagaagcaaacataggaaccaagcgctacccatcagcatggatacagctcatgaatgcaacctggaacaagacgcattcatgcatacacgagatgactccatttatatgacacgtaaactgcaaaaaacaatacagtgtttaggatacacacaataaaacaggaagaaatatacaggagtggtagacctcaaatccagggaaatcgtagcctccaggtgggagggagaaggatgagactgggggaccataaatggtgttcaactgtatcgataacttcttgatttcttaagctgaatttatgggtgcaaaggtgtttcttaacagtattttgattcctaaatatgtctgaaatatttcctaagacaaatttgaaaagggctcaagtcaatatttctgttcactgagtagaggaagttttctgcaagccaatggtctatccacagtgagaatctggagagagagagaggtgttggtcaggggcacctaggaacccattctgctttcaccctctggatgagttcattcaaagactaagagacctaaacatttggaaatgtaaacattcacttacatctgcatctgttaagtgttaagttctgacatgagcttagtctaaaagggatctgggcgggatatcaagaaccaaacatcacagatccagaaagagccttccctctgctacttccctgtctgcggtctctgcgtgacacaagttatggtttctaagggacagggaagcttggctgagatcactgcacctgctctcggcttgtgtgggccatggctctttcaaaaaagatcgtgctgcttagcataattaaaccaggaactcagcgcagcctcagagtgcgtggggtggggcagagctctgggaggccgagtggtgacttcctccagtccagcatccaccagccacacgggagatggtgtgggatgtgggatctgaaaggcttcatttggcctcataaatgggattagcatgggggcagctaccgaccagtcaccttctggagtcgagggcgcccaggtaaagggctttggcatggaagtgcaggttgctgaaggagtcatgggaggggacatgacagaagatgcttccacctgggcaacacctgtcattgggagggcatcgtgaacatggctggcacattccgggtgatctaaggctcaagttagacaaagttaacaggcacaggaaggatactgaatattgcgaggttgcagaagggaggccagggaatggctgtggcccaggtgtatcaaataaatgcccccgtactgttgtttgcgataacaagtcaggggtgttagaggagccaaagaccccctcagcacccaccaaacgggcaatcgaggttgttttaggcagaaactggattgccgcaaagctgacatgttggaaggggtgagatgagagctaagaacttctccaactcgtcctaacgtgtccctcctagaagtcacgaagagaaaagggcgagactatgaaacaaagtgtgtaaaggtggaaagaagtaaaaataaaattaagaagagttccatcctgattaaccctccatggaaaagctccagagaaggtgcctctgccaattgaaagtttttcactgtgagcaactctacgtaaaatgcatctggaccagcacattcccctgtggacagctctgcatggagatgtgacggggacaaatgatctgggaaatcattgttttcgtatcagtgtttgtaagtttcagagtttacttgaatgggaacataacagctcactaataaaaaatgaggaatgtcttactttttttaaaaaacgtttccccaaataggtttgcttatatgatctatttgggggtttggaatgagtatgtggaaaactgaaaaaaaaaaaattcagaaattaataaagacataaactccatgttttataatgcccagagtggtgcgtgcttccccgctggggtaactgaagttgccggagctgggttcactggggatcgtaagggagcttcccgggcggggccatccccagctgggggaggtggcatccaggcacctcatatgccgtgcctcgggccttacctgagcatcagagtttttaaaagtccttctgtcatgggcttgctgtaagaagtcaacataaatatggacagtgctcagaacatggggcgcctgatgtctggagcagcaaactgtgatcaaacactcatatttccacagcaaaataatgatccacactaatggaggtaaagaaggagaagactacgagccttcctcacccaacgcagacctaccagggctctgtgcgccagtgccacaggcatcccttgggtggtcacgtagcctaaaatacgaatgagactaaatatagggatgtgaaagttctgcttgacacttaaatgtgcttattaagacttaatccaattatattatcgggattgatatctataagtctctaatagacattcctatttaagttttaaaatatcatgcttcccacagctggcccctcaggccctcccgttccagggcttcactgcgaccacgtggcactcttcactgggaatatccctcttgcctctcctagaactgcctccaaccagattctggcgggagatgatgcaacctgcaaccaagtcacctgcacaggggccctggcccccaagggccttgggtgttgccagtagatccatgttcattttatcaacgacattctacccctctaaagccacattgtgtttgcaatctacaacaggtagatgacatcaagtcttacagcatttacaataatttcaagacaatgactcttatctccttaattagattacgagctccttaaaaggcatcccttgggtggtcacgtagcctaaaatacgaatgagactaaatatagggatgtgaaagttctgcttgatgcttaaatgtgcttattaagacttaatccaattatgttatcgggattgatatctataagtctctaatagacattcctatttaagttttaaaatatcatgcttcctatctaggcacgtaaaatgccatgtgacattagaacaaaaaattagcatgtagaatgattagcatgtgaaatatgatattagaacaataaattaacatgtagagtatgatttaatgtgaaagggccacgtgaggtggcattttagatagaaatgcactcacgcacacacacaagcacagatacacctccctccacacattcaactgagatctttcaaaggtgacatcaaaataaaaatagcacacaaattttatggaaaagagcaaatcaaaagattgttttctgtagtgataagacctgaaatgaaaacacatgaccagtggtggagacataaaggcattacgctgcccagaggcgcagcaaccaaaatagaaagctctttactttgcaggttgatgtgatttagcctaaggcactaaatcagcacctgttatcagatcacggtccttgggtcctgatttccttctgccagcaaagcaccttgatgagtgtctacaagagggcaaaggcagcataatgccgcccatggtaggactgcggggctgcacacattaggctctttgacgcttttattacagctacagcccaaggatgcagttccaactcctgcccttatgaaaataaaatggtgcacaccatacaagactatttaaatagaccagacttcagccatctgcaccccacttcttttgagacccacaaggtcggagtgcttgcacgagaggtaaaatgatttccctggaaacacgctcacctgtgcaccatgagagacccaaagctgaatagccctcttgccttccttgctcgattacacaagaaaagcaaaagcaaaaagcacctggcatggtgaatttaattctgcaaaaatatatcctgaatacaactccctattggaaatgtgaatatctaagcagcgttgtgtaggcctttcaaagcgactgcaaattatggtggaataatatggttaacacagaagttatggcatttttgctgtaaacaataccatcaagaaaatgaaaatacaacccactacggggaaaagtatttgcaaataatatgcctgagaaggcacttgtatctagaatatatacataattcttataactcaacaataaaaagataaatcacccaatttttaaaaatgggctagtgacctgatgtgacatttctccaaaaacatacagccaataaaaacatgagaagatgctctacatcatttgtcatcagaggaatgcaaatcaaaaccataaggaggcaccacttcatacccaccaggatggctgtattcaaaaggtgaacaataacaagtggggaaaaaatggatctcggctgggcatggtggctcacgcctgtaatcccagtactttgggaggccaagatgggcagatcacctgaggtcaggagtttgagaccagccttgaccaacagggtgaaatcctgtctctactaaaaatgcaaaaagtagctgggtgtgctggcaggtgcctataatcccagctactagggagactgaggcagaagaattgcttgaacccgggatgcagaggttgcagtgagccgagattgtgccattgcactccagcctgggcaacaagaggaaaactccgtcaaaaaaaaaaaaaaaaaaagctccatctatcactgctgggtgggaatgtacaatgttgcaatcactttggaaaatggtctagaagttcctcaaaagctcagacatagagttgccatcccagatccagcaattccactcccaggtataaacccaggagaaataaaaacatatgtccacacaaaaacctgtacaaaaatgttcacagcaccattagtcacaacagccaaaaagtagggacaacccaaatgtctatcaacttactaatggattaaaaaaatgtagtatatccatgcagtggaatattacttggcaatagagagaaatacctgctacaacacgaacgaaccttgaatacatgaggctaagtgaaagaagccagccacaaaaccccacattgtatgattccgtttatatgaaatacccagaataggcaactctacggagacagaaagtggatgtagggctgcagggggtcgtggaggggaaaagggggacagggttctgttctgaaggacgaaaacattacagatgtggtaacagttgcacaaccttgtgaatacacttaaaacatggaattgtacattttaaatgggtgaattgtatggtatgtgaattagatctcaaagctgtatgcaaaaacagaaacaaaatgttatggcattcagggcaatttgaagcaaaacaaatactgagatggttcttcagaagggactttcctttagccgggcaccaggtggcatgtacctgtggtcccagctattcaggaggctgaggcaggaggatcacttaagcccaggaggtggaagcagcagtgagccatgatcgtgcccctgcacttctgccagagcgagaaggcaaaaccttgtctcagaaagaaaaaaaaaaaaaagagagagagagactgtcttggtgccttttattatagtgcatcttgaagaatggaggggagtgccttcttccacacatctagctttcattctgagtccatactcaggacagatttggaatttttcacaaagactcccaggaggcaatggcttagtgtatgataagtaatttcctcaggatatttgcttcctggcaacaaaataaaatttagaatgcaaacaatatggtatattttgaaacagagtcccccagagggtagacaacgcttctcttagccactgtatagaacagtctagaagttggataaccttatttgtatggtagtaaccaatatctctatattcatgtgaattcaatccaatttggtgctacaaaaattaaaaatgcttgactcaaaattcttacatctaacctgactcaacaatccatcggcgcatgaaaaaaaaaattcccctttaagaatttctagttattgaattcaggattgtttatctctgagagggagacaaaatcagaagtaagtttggagtctcagggaaaacataacaagttgattattgtttaagtctaaaaggcaccaaagcacttgtccctgggtaccactcagatgcaggcaacattcagttaaagtgcctcatggctttttttcctatgaggcctacagaatggtccctcacaagttttctatttctgttctgcttcaaagaaagactttctcaacttttttagggctccagtcctggcccatcgtggatggtgagatattctttagatgtttgttctgtttttttttaagttgatatatatttaggcccaaagtcatgtttattcacaaatccaaacaaccggcaagctaaggctaattttttcatgtagaatatttatgaaagaaaacaatgaataaacaacttaagattggggatttactctgaagggcactttccggaacatgtcataggctcagccccagttcaaccccatctccactgcggtttggaaaattgtcaggcctgagagagagcaaggggttctgtttactccactctaggattaaggaatggaaatatagggagagccaagtaaggaggttgtgactcagttcctccccctggataaatgtctgcacagactttagacttctggttttcaaactggggttcaataggaccctgagttcagtggagtgggaggtactacagagatgaagcagatgcccctaaaaagtggctctttctgcataagatgtttaaaaaactgggttccgggtgtgagataaatggcagaaccttgatttagatctactttcggggttgttacagaaagatctgttgggctgtctggggtgagattagatgattctcattatttttctatggttaaaattgctatagctaccatggtgtattgcaaagtttggtacttatatcaatgactcaggagcactgagacactgatatactgaattatcaaaagtttaattttttttttttttttttgagacagagttttgctcttgttgcccaggctggagtgcagtcttggctcaccgtaatctccgcctcctgggttcaagcaattctcctgactcggcctcctgagtagctgggattacaggcgcatgccaccactcccagctaatttttgtatttttagtagagacggggcttcaccatgttggtcaggctggtctcgaactcctgacctcagctgatctgcccgcctcgtcctcctaaagtgctgagattacaggcgtgagccaccgtgcctggcgtaaaagtttaattttatttagacaagttttagtgtcaagtatattttattaatctgtaattactcgaaaatgggaaatttacaaactggaatactcaggcaattggaaaacatctccctacacttatttgaagatttaaaaaatgtattagcttcggactagttattcttgttctcttttacatatttttctaatcattcctactcattttctcatcttgatttttttctctcctcctatctcctcattatatctcttgctatttagttcaacatgagatcttttacaaccaaatagcttgctagaaacagcaatgcttcatggtaaacagcgtgagggaaagatgttctgaaatggttatataagcacgtgtggcatcaactacaacgtgaggcacgtcatttgatcaatgtataaatagcaagtcgtaaatgattctttccactcctgagcagcctggcagtagcacagaaggtaaatgcaaatggccttccgctcctttcccgtgaataaggagataatcccaccaacataggccttggcagcaggaagcgcagcaggaaattcatgtgaatttctgaattctgagagaactagttacccatcggctgtagcaaaaatcaagaacaaaattcaaaggaaagaattcatgatggttaatacagataaaacctatgcaactgggttacacacttcatgaggccaaacacttaaatatgcatttagcataaaatgtgtttctgccgagggccatggaggcctccaaaaatgctactttcacccagggcccctcaggagtctttaccttctccgttgtttcctatattaataacaaattccttctactaatttatcaaaacataatcactgcagttaaaaggcagcgctgccaaatatttgaccataaaatcatatggaaagtagtggtaaagaaataatgttaccatgttttcataaaattcatcctaccaacaaatatatgcatatacaattattacatttattatagagttataacagaatagtttttaaaactggaaagccacatgtaataaataatatacctttcctaaaatcagtacttatttctgtctttcttttttgaatcctcacttctttaaattactatctgcatattctggattttagcctgggagagtattatgagaatgagaagtacaaagaaaaagaacaaaagtatccttaaacctactaaataccctgaaaggataaaaagaatgattgcagacagataatatatttatttttttcaacgaatgaaataaatttaatcctatttatcccagtttactatctcaaatagactggtaaaactgaaaaagcatttctactatgttttgaagcaaatttaaaagtattattatattttccaaatatacatcctattaagacatgcccatatttttcacatatagccatttagcataatttcaacaagtccaaagctgctaaatataccatatgtgcccatttattctaatgaaccaataacacaaatacattaccagattcatgcccctctgctcagaaagtatcactagcctgtagctgctgaaaagctgttccatctcagtcacccactccaccatcatccgacatgacctatcctgctcctggccagaggaccttttcaacattggattccaattcctcatctaggcaaaaggtatataacatacttatcctcaggcaagcttcttgtacagagtgaatgagataaaatatgtgtgtcacaacgcctttatctgtgtcagagaaaatccaaatcaaactggcttaaacaatgaaagaaattgcttggctcatataactgaaatatctcaaggtaatgtggacttcaagctcaggctgatcagggctccaatctcatttctctgtggatttcccagctctttcctctcgtgtgttggcaccatccttaagctgggtaacttatggtcacagatggctgcaaaaccgcaagtcaggactccacgtttccatgtttctccacagccactgggcagggatctcaggttacatcctatttgaccatcttgggccacattctcaaccctgagctcatccctgtgaccaggaaagtgccatgggtagggcacacacgcccaggatgcagatctccctggggccaaacaaacttaaaaacaaaaagtttctctaaaaacaaggtaggcttggctttctccaactgcctcatcctctaattgcacagaagaaatactgtgaatgaataaggcatccaacccattctccaacacccctttcccaggcctgtttgttctttttcctcttatttttcctccgtcgtccaacatcaagatgcaagggccgcaatctgagtgtgagggccagggaactcactgaccatctgggggggctctaggaaaagcctggaagagactctctgtgggaagctcaggggagtcaagccccttgacgaggtgtgtgatgtgggcaggtgtgatggaagaaaagagactgggacttgtcctttctggcttctcagtggtctgctcagagacgtttatcctccttgcagctggtgcatgagtgaaactctgaatttgtagttttccttaggagaaagatggcatgcacccctgggtcacctggcaaagctataacacacggtggctcctgcagacccctggctcccctcgcgggcttgcaaccaggcactcttcctctctccctccatgacagaccagggcgaggaaaggagaaatgatgagctctgagctggggccttgctgcccgactgcctccactaatcctgctcatctgaccgaggtcagacactgctttgcagagcccgtgggctgtgctccatttatcactctgtccgggcgtctgttgttacccatgctcgggtaggaaaatgctgagtgaaggtaacaggactgtgcagttgggaagctcatctcctcttacatttggatgttttcccaagtggccactgccaaatttactccacatcagcctctctctctccatgcccttgacctgtcctcctccctctggccctgcgcactacgtcccacttgtttcttgactcttctccactcttccccttctcttgtctttcttcttcctgcctcttctctcccctctcctcctgccctttaattattgtttaaaagacagatgcttgagcagtgtttcccggacctcccagagaaagctgacccagaggacacggagctatccatttgggtggacttttcagggcctttccctgtatttcaagtccttagttaaaagcacgtgtctgaattttctaagttaaggggggaggtttgatttagtgatcagaaaaatttccagtcctgaaacatgcctgcttttacctggaatccttcactttcagtggcatttgcagtttgacatgaatgcttccggtgctgcatttcatagacctgctgatttgtagctcagcctgtcgccaccattcaggcggctggggtgcaagagctaggagcagtgctgctgaaagtctttaagacttcagtgaagcaaacagattgcagtataacgagaaacatggagttttttcaaaacaattttgtctactgctgaaatttgcaaaacacgtcaccgaaggagtctcaggttgatcctgtacagaggagagctctgacctgcctcactaacccacaccctgagctactcaccctgcttcacggtcacgcctgtttctaaaaggtagctcaggctgaagatctaggagtcatctttgatttttctgtcatgtatagtgtgtccaggctatctgcaaggcctgtccaccctggtgtcggatggcagctccgagagcttgctagctcagtttcttctctgccagccttcaatctaattgcacgcatcacccaaaggatccttttaaattgagatatgatcccatcactcccttatgtgaaacattagggctttccacggccttcaggacacagtcgggctttccacggccttcaggacacagtcgggcttttcacggccttcaggacacagtcgggctttccacggccttcaggacacagtcgggctttccacggccttcaggacacagtcgggctttccatggccttcaggacacagattcctccccaaggccccaagagctttgggctctcacagcccaccccatcttccccgtctttctggggacactgacttctggcaggtgccagatgaggccaaagcccagtcagctcaggaaccaggcttgagccacatctcccccagaaactctgccccacaccctctaggggccaatcacctctttcattcagccctgcggagatgtctccctggactgccctctcaaacactgtcctcctctgccactcatggctccctgccatgccttacaatttgtgtatgtttgagatcagtacatttttctatgtagacttgatttgtagacagatatagatgcagccgagcttcctacgcctgtcggaggctgaacatctggctctggaatgccatgtggacatctagtgaacacctcgagccctctatcgtaatacctcgagcccccattcccagaaggacactgggacacagctgtgctgcccggcccgcttcctacccaggccccgagggcaggtgttcaccttctgtgaccaggccctgccctgccctggcccctgcccgtgtccctcccacactgaggccacagccctgcctgcgtcctgtctgctgcatcttctacaacatgctatcttcctcaaagctgaactgaccagaatattcgctttgtcttgctgctgtgacaaattccacaaattcagtggtttgaaacacagggttttccctcccagttgtggagatcggaagttcgggatccattttgctggtgttggcaaggccggtccctccggtgactccatgtccagccctgggggccacctgcgttccttgctcctgacccttcctccacccctgtaacctctgcctccctgtcacaccctttcccgcttctgcaatcagacctcctctgcctcctctcacgaggactcttgtgattacatttagggcctccccagattatccaggaacatcacgccatctccaggtccttaacttgatcgcacctacaaagcccattttgccacatatgggaacagctccaggttccaggcttaggctgtggctttctcgaggagacattatccagccttccacacccaccaagaacaccaggggtctacacctgagcacctgcgtcagggctggatgtggggctcagccggatgaagcccaggtcccgactagtcctactttatttcctgccattgaaatcccagcaggatgtggccgcattgttcattagcaccttttttcagaagttcagttctgataattaacattccctctcagctgactcatctgactgggaaacaagcatagatagatgttccactgggggctgagccatgcgactcccgcaccacacaccagaaagaacatcgtgtctcacactcccaggctggccttccagccaccgtggactccctgtgcacagtattttggtcacaggtcacaaaagcaaaaaggaaacgtagaggaagaagatgtagaataaagggaggagtaagaaaagcatttctgaagatgattgaagatatcggaggggatgcctttttctttttaatgaaaggaagcagtggacaaaggccaggctgacctgcccagtcacatcggaaggacctgctgaccccctggggccccagagatgcccggcctttcccgcttgaaacacaaacctgcggcgcacaggccaacggtgcccacacaccgtgtgctcgctccgctcataccaggtaggaaacagcaaaagcaagagctgggtgcaggtgctggaatgagataccgatggtctccgggacctctctccttatccccgctctatcctgtcctggaccatcttgaacatcagagagggagagcacacccccccaggatgggcgctctgtcccctgtgctgcctgtggggtctagacaccattgaggacttgcccactcagcgcaggactcccgcccactctttgccctttgtgaacaaggggatggatctgctgcatttgggagacatctccctgcatacacaggcctcactgcagtcattctcattcaatggaattcagcctaaatgacgacgctttttagacacccaatccctgtaacagcagtccctgcgctaggcctctaccgtgtctcttgccgtaccctgccacccactgtgtgtgggtgcagggacgcagcctcagtggggagaaggtgccagtcagaccacaccccggctgacctgccatgccacctgagagccccccagcactctggagtttcatttattacgggtcagaccctgtaaggcagatgttatactaattttacagagaagaaaattgagcctcaagaagttcccattggtgaccttgccaaagtcatatgagtgccacatagcagagccagaattcacaacatgggggctacctccaaagccccaaccccgacgcatggatcacaggcaacagctcccctcaccagctgcaggagaaatcaccaccaccactaacgggacccgccctgctcaccagcagcagctctcatgcctgcctgaggccatgtcaaccgagtcgctcctgtccagcaacacgtgttcacatacatgacggtacagttgcggacagctccggtaggtgcatggcgcaccttctacagcctagggacagccaggctcaagagagggagatgaacatgcagaacccccgaccctgactccggaaaatggctccaaaggctctcagctgcaggtccatccttcccatccatcctccctctgccaggccagagcccaggcccacagctctgagctgcatgtgggtgtcaggccagctggggagcagggcctgatggccacatgtgggtgtggcaggatttttgccctagagacctgggctcacacaggggcagtgagcccactgtggtgcccatggggggctgcccagcaggagccacagtgctgacctagcccagagccaccaaggcccctgacaacaggtgcctgactctcctaatctaaggtgcgccaaggcccctaacacccaagaggaagaggaacaaatgaatgtgggagaaagaactgagcccagaaggttcatgggtccaggtacaggagagcccttgacagaagcccggctctgcctgacagaaggtgccgggcgcccgctccatcgtgggccgaaggcagtcacaggctggaatgtgcagagggaagtcattcatcacagaaactcagcgtcaggagtcaaagactttaaatctcactataaatctctatcagcaatgtcacgaaggccatcttcctagaataaaacctattctagaagcaacagcttttaaaacaaacatccttattgacttttcctgtttttctatttcttaaaaattaccagcattaatacatgtggaaatctgtgcattttaaaaaatgttgatagtttctcaatcttttaagatattttgttgcttttaaaaatttttaagtaatcaaagttgttcggggattttttcccaaaaatgttattgtaagataacactagatcagctatattgtgagcctagattagacattttttctacagaaaatttttcaaggccaaacagtagttagtaagaaacccaatgccagcaccacctcatgctgttatgtggttctctcgtggcttctgagtaatttgacttacgcgacggttttaatgacctcctcctccattggcgtcaggtaagcaccactttttgtctgcattttaaccctctacacccaagtcctactgataatttaggcacgtagtgaatagtcagtccatggctaattcctaagataaaatgtcctaaatgacctccaaggactttgtacatattaacctagaagctgcgaattacatggagaatggccacgcatggctcgggggcaacggtcccgcaacagccacagctgtctgtggctgccgagcaaacgccaagtccagcctgcggcaccttccttctgcacaagcttcaccagcatttttagcggcacagaccacaaatcagcccgaggttttctgtaaattcacacacagcaaagaagtattatggggtccaggctgatgacaccattggggagaacccgtgtgctctgtcccggatggctgagagaacgtgaagctctgcagactcggagcctggccatgcaaggggacctgtgattcaggacacttcttaaaactccagaatataccactgtgggtgaccaagccttgaaactccagaatgttcccaccatgggtggccaagccacatcacagggaagaaaccttcaatgtgctttctgtgcagcacactcctctcttctgtgatctgaacacgaaccaccacctctaggctaggactcagatgcagtgagctccactatacccacagtcacatacggacagtaacttctcttcccgaatcctgtctggatccaagtgtccctgggccagagtctccctaagagacagccctgagtccaagcccctgagaagctcagggccatgcaaagcaggaggcctgggtgtggaaggggtatgggtagggcctgagaatggactgaggggcagacagttcagggaagggaagatcactggggtagagaggtgacctggagggaggtcagcgtgggcaggggtgagaccaaggaaaagattgaccatcactagaagatcaggctcacaggcagtgagaggccttggctgagtgggaggtggagatagtaaaatgaaaacacgggcactactctataactcccatggcaattcgggcaaatgcccatcacctccgttacatccaagcttcgggagggtaggacgagcgtctcagacgtacatctcttctcctgcctcacgcacacagagtgattgtggccagctcattttagcaggtcacactcccttccctccatcagttgttgttctgctgtcatgagccttgacaccgcagtacgacgcgctcaggaagacatcaggacagaggtctagacgcttacaaccctgagagacacactggacgctgcgcgcaagagccctgtgcatatggactccgattgacgccatcagattcgcccacaagccctgtgcgtatgggctccaatcgatgccatcagattcgcgcaccagccctgtgcatatgggctcccatcgatgccatcagattcgcgcacgagccctgtgcgtatgggctcccatcgatgccatcagcaaagttttttcacttctttgttgggttgtactctacaaggacttgactgagtcacacatcatgatccatgcgttttctttgttaagatctagaaataagagacagacccaacctcatgctgtgtctcgggttctctggaatgaaggcagtcagctatagtcaccactttgattcccgcagcccgtctgttcagtccctgaagtgatgagaaaccaagaagaattcaagaagtcaaaggtgttctaaaaataaatgctcttttgaaagttgttttgtttgtctgtgtttctttccttcgctatgttcaaagtcaaccaatcaacagagttgctttaacaagttacaggcaagagggcttctcgtagcacctttgcaagcatagtgtagaacgcagcagtctctccagggcttgaccctgtgacagagagcccagggccccaggtgcctgcaggagctgacggccatgtggcctgaagtcttaaggctcgtggagggcctgcagagccccctgggcttcctgcctcctcccagccttgcccggctcccagcttttctcacacagagtcctctcaaagccatcttctctgctcctcttgtgttttacccacagttcagaacaagaggcttccttggtttttcaccctcagaaagattgtccacatgatattatggatgtaaaactatttggaagctaatatgatatctgaccttagttctagagaactagttgcaattatcctgggctgagagcattaaaattgggacctgtgcgagcttcttaagtagtcgctagggcatttctaccataaccattccaaaacaaagtcattcaaagtaaaatccccccactcctcctgttataaatttggcctcacagtttaatgagtaaaagctgcaagcccacaggcccttggcaggatgtgtggccaagatgtcttggtgcaaagaatgttaccgtgcacttcgagtgcagagactgctctccacagcaggccccaggcttgcattctggctaatgtccatctgaaaattcagattgtgaaactacagcatacgaatcattccacaggtatgaggcctgtttttcttatttgtcaatctcattcaagcctttcttttctttggcaacaggaggaaatacactggccaatacctaagtactaatctttgattcattttttaaaaatcttgctaatttcatacagaagacagaataactgaaagaagaaacaattcttttctctaaaaggctagataatttctaccagtgccttctcctttctcccaacagtccccactcagccattccttgtgggctgatgccagaaacagcgtggaaaacaagtctgttttccaagaggggctattaccacgaattatgtttaaaatgacagcatcaaagattaaaccatcattgtatataaacttaacatagctataacctaggaaaagctagtttcatggtgataatactaattagaaacagatgtgtattcaaaggggcaaggaaagaggctggcaggagagaaaaaacatttttcccccataatgtagtgcaagaacctttacagatatggtctcaccaaagtcagctttgtgcaacaccacggatgccaagtgcaagctgtcctgacaaggcacatttcactgatgaagcatttaataaattgcagataacccttattacagggttacccctattttgtagctggggagacaggtgctcagaaggattcagtggtttggcaagggagacagcaagaacactagggcagtgtgaggtggctgggagaaggggcagccggcaaggtcaggcacttcccacggcaggagactggcaccgagcaggggcaggagggaaacagggacaccacctgctccatgcctgcagaatcctacctccacggggcaaggcaagggcaaaccacccagcctggggagctttgcacaccaaggctcatagaggaagactggctagggagcattcgccgaatggaatcaggtagggctctcatatcagtagcattcttgggaacaccctctgactgatctccaggaacgcatgcaaatgactgcataacatatgcaaatgactgcataacaacaggtacacatcttggctggtcggaaacactgcttctggcctgcttggtaataaatcctaggtgtatggttacgcacatttgtcctccacgccctgatatgcaggtgcctccggcttccttgtagctgcaccattattttcccctagctaagcagttagcaggcaaggcttctcacgcagctgcaagtcagatgtgattaacagtatttcatatggaatatatttgtgtctgatccatttgcttgattaaatcacactgtagcttaacagcctatttgttgataatttttacttatttgaattcaatgtaatagcttttactagtgaaaatatatcagcaaacataaaacgctgagaaaatgcaacacaacctaattcagtgtaatcagaaataaaagcagagcattctagagaatgctgctagtcttagaccagctctgcttatttaataagcacagatccttggagcaaaaaaggtagagtatttctggctaagttactggttaccaactccacgtcatacaaagtaaactcatcctggtcccccatatcaaaggagcactctcctggcagctccctgaaggtccccaaggccgcacacatctctggttgacccgaacgttgccttcatcctgaagctacagccctaaagcctctttcctccccttccccttcacagccagcagccctggaagctgcctcagagagttcatacttctcccacccactattaaattgccacttctgagaaactatttgccccacatgtgagaaacagaatgaaattccaggtaaatggtaagtcagaggatgtgaacatagttccttttttatttaatgggcttccacttcattcttctacttctgaatgcatgaaaaatagtctgaacagtctttgctgtgctgggtgtggccaaagacagtcagcacgtgggtttacggaaaaggacgggcaaagcaaaaggggcaaaatctcactacgtttagttgtcttttcacatcgtttaaaaaaacaacaacactatttcggggatttttcctgaacgtaaagagagaaagtatgtaatgaaattccaagcataaggcatatcacagaaattgtgaccacaaataaggaattaagcttaatgtctttaaaatgagtatataaaggagcaaaaagaagaacaaattccaattcagtattcactaatatggactatttattgtggtttttttttggctgtcagaaaatccaataaaattaagataaacataatttctttgggagcatttattgagagtacctgaaaattatcttaattagaaatggttttcttggaaaccacccaagatctagaagaagagctcacctatcatgccccaagaataagccttagtggtaaactttccaggaagctttctttttatccatgactggagccaatattgttcctgatgcttgctaagagtcccttcacacttcctttattaggataccatgttttccttaaaagggatgagcaattaaaatgtctttatatgtacagatagatgaattctgatgatctgtgaccaccagaaatagaaataaattgacaattgatctaatcagaccatttaaatccaaagctgccaataatttcacagcacttataccctgatagcaagcttcttttgacttgtttgcctctattgttagacattaagctcactgagggcagggatcctatttttatgtcccagttgcttagcacaatgcacacagtatgtgctaaaatcttttgagtgtatgaacaattgagcaaatagataaataaaacgaaattctccttccactcagcagttcatcactagcaatatcccaggtagagtctcgcattttgtcttcctcattcactccctactgtctttcaggagaaatgccagttacagctgaaatagctcaaataataggtcaccaaagagaaccctctggctttggtaactccaaactaataactgcttcctaaatgaaatgactttgcatattgacacctttagcaagttggtggaagtcttgagttaataatctcacttttaattagtttaaatgtacattccctgttggaagaaatacaaactaagctttggaggttccacatcccatcttctgaggctctactggcgtgtggaaaggttgagtggggagaagattcctttcagctcagtggacctatggttctgctaagttaggacggtgagggtggtgcatttccttgctctcaaagccaccttagctcattaggcaactggcatgggtaacgtattttgtagataagtgcagtgactcataggccagacactcagagggtatcctatcccagccaggtgacggtaactccagcttagcaaatgggccagtgtcccctttcctcatctatgaagtggactgttgaatgagatgcaggttactctgcccagcaatgtgtcgtggttcttaggcaatactgtcaatgccctgaaagcagagctctcttggggatgagggtcttgcggtcactgagacctgacacctttctggggcacacccatggaagtctatggaagatacccagttttcctctagaaacccccaaaattatagttgccagagtcaacaacttggccatctcacttggttctatgctgatagaggacaaaaatattcagtgaatttcattttaatctgtaattaataaactgtttccaaatatgattaagtaacctgacttctctgtcacttagggtttagcaaatgttgggttatggacgtaaaatttattttaaaatcaagtatgttcagagaagttttgccaagcataaatgtaaaagagaggaaaaaaaagaaggaactttagaaatttctcattatttaaaaaaataaaaaatgaaaataaataaaatcaagtatgaaaacattaggactgagtctctctctgaaagccttttaaatgaagatattgttttcaacttaaagtaactacattaatttcctgtttatgtcactagactttgaatttcaaataacaaaaattttcaaagtctttgtatatttcaaaatataaatttcacagaaacaattttaaaatgtttcctattataaaacaagttatctttctcattcatccacacagaggaaatacacatctgtgttcagtactttgtgtcctatttctcaacctcaatccattgacagacctcccctgctcagttttacattttttgatgagtgcttcttggcctataaccagctgtgaacacacaaacgaacaggcagccttctcaagtatgggtagggcgcagaagaggaacttactggactggggcacaaagtcagctgcttgtgagactcatcactgggtggaagtgccctgaggccaggacttctatgtctcgtgtctttttggacacagtatccagaaaaagaccagcccaagacccggtcctccataaacacttgcagaatgaattccttggaaagcttttaacaagactctcaaactctcagggtttcttccccttagcaatagaatgaggaaagttacatatgctaccccgattttcacaagtatcaaataatagaaagctggggaatgcatttgtaaaaaagagagcattgtattagcattgacctttttttttttgagacaagtctcgctctctcgccaggctggagtgcagtggcgcaatctcggctcactgcaacctctgactccctggttcaagcgattctcctgcctcagcctcctgagcagctgggattacaggcacgcgccaccatgcccagctaatttttgtatatttagtagagatggggtttctccatgttggccagaatggtctcgatctcctgacctcataatccgcccgccttaggctcccaaagggctggcattacaggcatgagccactgcgcccggccattattgaccatcttagtgagacctccagcacctagtacgggatctggcacacaggaagcactaattgactacttgctcttagactacatgtattttcagcccatttgacctcctacatcgctgatggtttatgtatgacttctagaaattttatttctacatggaagaaacctcgtttcctattcccaccacccccccacccccccccccgcttgtttcccactgtattctttccggaggcacgcctgcagcccagccctccttgcagaaccctgtgacaccagaggcgtgtgtatccagaatcaggcagattcctgaactcccactggtcagccagtgtctagtgctgctcttcataaacaatgcctggagtgtgctcacacgtgtacctcttcttggcaaagacagtaaatggaaggagacaaggagttgtctaataaacttggcattgagatgaaacaggaaacaaagacatgtatccggataaagataaatactgttctgagtttctgatcttgtcaacttcagattttttaagtgcctgtgtcccaggaaaatgatttgcctcactggtgtgcttcatttctttcaatattagacttaaaagcaagccctcctccagtactggattaacagttttgtttgaaagatgtgttttaccctcgggaaccggccatactgatcctatctagtacttccaattctgatttagggatgccataagagaaactttttaaacaagtaattctcttctacttttttgtctattcctcaggtctctcaatggttacagaacccatgtctgtgtctaatatcatggcagctgggacaaagaaaaccaagatgaaacatttgagattgttccagctgaaacaaaccaaccaaaaccccacaggtgccagccttgaggcaaaggcgggacagtgtcaggcgaaatctttgggtcccagcctcagtctccccatcaccatgtctttttcacttaaacacgtttcactgttttgtcatctatagattcaacaatgtgatttggacactgggaataagagaataagatttgatggttgaaataaaacacaccacgagagaaccgtccacaaggaaactctaagatgccaagatgcgggacaggtagaaaggacagggctttgggagtactctgggttttcaggacgaatctgtatcagcctcggcgctgcgaggatattgcatcaggctctttactcctgaacgccgttttagacgcctaagcagattgtgctgctgcctgttcttccccgttctgtgaattctacactgacttcaagtgcacgaatgagctacaagataaggtggaacctgccggccgggcacggcagacagcacctgatcagcgcctcggagggcggagctggggggcttctccactcgggactttgagggacccccgcggagcgctccgcgccactcggcggtctagctgcagagaaagcccctcctcacccggggctccctgtggcccacaggggaccatcccacaccccgtgcagccagcggcggagaaaccagctggaaatgcagtgggggtggagttgcccccgcgaggacccacggaccgcccaattactacggagtcccagcgataacgtttggagccgtttggttcgattttcggaaccggaccagctttccagtaacttgaactccctgacgggtctcggggtccacccaggggtggcgaggcgggctcgggcgaccacggcccgctcagtgcccggcacctgcgcgccccgagggcggccgcattacctcgagccggctcaggctggagctcttggagcgcgacttcctgcgcaggtacacagagaagaacctgcgcacggcgaacttcttcatgctcaggtccatcgccccgcgcccagcccggagcagccgcagggccgggggacgcgcatccccggcatcccaggcgcggggctcaggtccgcgggcgggcacgcgtggccagggagcccggcacggcggccatgggcgcggggcgtggggcgcgagctgcggtcacaaagggcaggccgcgccggccaccgcggccggggccacaatcgctccctccgcctccttctccgcctcccctgcgagtaccagcgccggccacgcgccacgcctacaccacgcccaccaccactaccaccaatcagcgcccgccgctccgcgccccggcacgcacacctcctcctcctccgccccgccccgccactacggccaatcagcgctcaccacccctcccgttcccacccaccaccagcactgccaatgagagcccaccgccccgcccgggagagccccgcctctgccgatacctccaatcatcagcgccgccctgtggttccaggtgcccatccctcctcctctttctactccttcctacaagaaccagctccgtgcagccccgcccccacgcggttccgcccacggccccgcccacagcactgcccgccaatcagtgcccgcagccgccgcatacctaatgagcctcggcccgggacagctcccggcccgggcgagttgtgcagctgctccggagccgcgcagtcgcgggcgttcctgtcacgcaacttcggcccggctgctctttcttccagcttggggccgtcattatgttttccttccttaaaacatccctatgcacactttgtcatcatgtttttctctgccgaaccaaactttaattgttgatcagcaaacgcagccaaaacctcagcggcacagcgagcgagggaccgccgcctgccagcgggccctgcagctcggccaggagccgccctccgcggaaccggcgccttccctccgccggagcggacaaaggcgcccgagggcgggggctcaggcagccctcggggcgcctccctcccgcggctgcagaacaaagacgcatccgccctccgcagccggtcccgctctaggaaacgtctacacagatggcttatcagggcccgcgctgggaatacccgggcggggtgacctgggtctagggcaaggccctcagacccgctgctggcggcagcgccgctcgggatccgccttaaagggaaacacttttttcttttttttcctagaaatgctcaccaagggctgcagcagggccgagaatgcgggctcacgaccccgtgcagcctgctctgttttcctcttgtgcacgtgttgagtttgtatttaaaaacagggagaaaccgagcccattgacatagcaccatcaccacctgcaaagagcagaaacgagtgcggtggtgagttgacaagtcttgcttgctcttttgcagtgcgaactgcaaaatcctcgcgttgttttgctccctggactagtcagatgttgcgttaatacttgtgtagtctattttggctaaggtgggtagagaggtcagaatgtccttaaataagagctttaaagtcatgctgcatccgggctgaggtgaggtcagataggctctctgggtttcctggagacccgcgttgagcggtgctgctccggagtggaagccgggagtttagcaccacgactctggcgctgccccttccttgcttggtgaacttgggtgccgttgcacgttgttcccacgactcatctctaagaggaaaatacgagtgaaacctgtctcacctcccttactggataccaagaggcttatgcaagatcacggatgtgggagtgctttgtgaatttaaatagtgcaattgattttcatattatgtattaaaggatctataatgactattctttaaaaacagaagtgcaggaccccacaaggacaccaaacaccactttttgctccttttcaagatggtgtgccagttaagtgcccatgaaaactgctttgcctgcttcctttaaggttctgctgggagggtagtaatctgtgctctcagaaccagcctcttagtgccctgtatccctgctgggaccctcaggcatcctggctctaggcaaacacaaagacactctgtacccagcacgggaagaggtagatggacctccaactggacacagactccgggaatgagggaggaccaacccgaccatgcttccctcggaaggggagccagtaatactggccggagacaggagtgctgaatgccacctataccaactcatgggcatcctgttcaggacaaaagccccaaggcaggcaggcctaagtcaaggcttgtgttgtaccaacaatagtattttgacctgatctgacaaaattggaaaggaaatatttcatgggacattcattagttccccaaatttgaaggcaacaaaactgttctgttgaacttgggagggaaaatcattcagatttcactggaattcattgctagaacaataaatctgtttgcctttgtttttctcctggtaaaatacacgtataccaaaatctctagtgatcatggaacactacttcatgtgattatgtaatgaaatcctccaaaaccactaaatctagggtaggtataatatcaagacccactgtaaccgaaatccaaattatccttaccaaataccagaaaagaaagtgaacttgataaaggctcttgcccagatgatggaatgggagaggactgaagagaagataaagagcttggtagacctctgagtatctcacatttcctctgactcaagcacagtaagtttgagactgaattccgtggtgactgctgcttctatgagtaccagattagctgatgtgtggtcaatgcaattccacaagtgattatcgagcactaacatctggcactgtggtggtcatttgtgacacaaaatgattacaacatcccaagaagttcacagtcttatggaagagaaggtgagtgaacagacaaagctcatgccgtttttatgtaaagtgaaagaaatgcgtaagagatgaatgagaagccaattctaattggcgaagtcaaggaggagatggcctttgctctgaacccctgagggtaagaagatgagggaataagtttcctggacagacaagaggaggcgggagtcccaggctgaggaataacagggcactgtcaggcagctgtgacaaggtttcccatctctccctgctacacaggcaccttgtgggtaaggctggtgtgctctctgcatatgggaagatgccacattctcggggcaccccacaggagtggcttgagtgacatccaagagcttctaattagtcaagtaccacaaatgtctgttcgtctccaaacagtcctacaggctgctgaaagtttcaagcttctaaaactcccacatattttcaataaaacgctaaattgcacttcaagtgaaactatatatctttaaaataaattgaaacattcggtcttcattaggactaaagttttgccatgggaggtgaattcactaggttcacctgatgcaaaacttcaccaggatcaccagggtcacctggtgctggccatctgcgaaagcaggaagtcgtgcttttccggagtatcagcattcgaaggctctgcccatcacaggcatcctgctggatgctccagagacagtgtccagccagtacgagggagggaggtgggcttcagtgtgtgcccctgtgaactacttcctgtggctgtgatacaaatgggtttagtcaagcttcccttagtgtagtccctgagtgtacagaaaggaatccttttcctgggctgtggatccccgtgtacttgaaatgtttatgactttgaagtttcttgaatgtaggaattagtccttgctcaggaagatggtcttaaagtcctgagaccctagaaggtaaactgtagtggacagttcaggtgggggcacgttcggagcaggtgtcagcaaggggcctggagctgtcagggaagggcttcttgggccctcggcaaaagtcagaagggatcaagtttgcctctggtctctggctggcccctggccctcacccacaggacacttgggtctcattcacatctgggtgccaaccaagccatgtcagaatgacacctgtgccctcagtttaacagtttaaaatctctgagcatatcgaaaatttaaaaagaaagtcttaatgcgtaaaagtcttcaaaatgacagaaataaagctctaatggtgaagtaccaggaaatggaatttacatttgaaaccagagggcctggtttctgagtagtcaggagaggcaggtggaaacccacaggccagttgtacttgacccttattgactggcttacatttaggaagaaaaaccacattgggtttcaagctgtggaaaccatcatggttggcttcctccctccccgctggagccctcatcccccatccaacctgggtaggaaggcacagggctcacagaaggtgggcttcacctgcaacacctcccccgccagcccgctgtgaggacagctttggattttattggtttttaaatactatgttccttcataccactttcttttgaaacccatttataaaccatagggccagaatctacagagaggctgatcaaataactttcctggtaacacagattttttttcgtccctctgcctggggcactctggtgccttccatggtgtcagcggagcacggctggagtcatgactcccaaacagcgagaagggagggccctgcctcagtgagccctttttctctttgagacagtggaacccaagagatagatgcgaacacacagagcagtcatagacacagcggagcagagacagaccagagagaggctgcgcggcaaacggagcccagacaggtggcacctcagggcagcaccagtatcagctaaggtgtaaatgcctcgaaaagacctaaatcaaacaccacatgagagagatgaaattcagacagagaggcggtggggacagcgctcctctccgcacatttccaggatactaactccagctgccatgcggtgccttcaacctccaggacctgtctgcctcatagctgaagctttgtaccctttgagcaacatcgcccttccccacccccagccctggggagtttttagactccacagataagtgagatcatggacatttgtctccccatgtctggcttattccacttagtatgatgtccccaggcccacctgtgttgcccgcaggtagctatgtgagatgatgggtgtgttcattagcttgattgtgggaacccttacatgaggtatacctacagcaaacaccatggggtgtcccttaaattatgcaacttttggctgcacggggtagctcacgcctataatcccagcactttgggaggctgaggtgggcagatcacctgagatcaggagttcgagaccagcctgaccaacatggagaaaccccttctctactaaaaatacaaaattagccgggcatggtggcgcatgcctgtaatcccagctactcgggaggctaaggcaggagcatcccttgaacctgggaggcagagttgcagtgagtggagatcataccattgcactccagcctgggcaacaagagcgaaactccatctcaaaaaaaaaaaaaaaatttctttgtcaattatacctcaacaaagctggagaaaataaaaagaatgaatgaggaaggacatacagaaatcaacagcaacaacacagaggagaaagaccagaagacagacacaaagaccaggagaccaagaaggaacttaacccaaaggaaaggaaactgggagcccgagcttagtgagggaggagaaagcagggacagacagcgcaactcaggaacagggtcggggagaggcagaggcacactgagcggtgtggggaggccagaggacaacgtggactcaacatgggcgtgaaatacctcggggccgggcgcaggggctcatgcctgcaatcccagcatttcgggaggccgagatgggcagatcacttgagcccaggagttcaaggccaacttgggcaatatggcaaaacccatgttttctctactaaaaaatacaaaaattagttggatgtggtggtgtgtgcctgtggtcccagctacttgggaggctgaagtgggacgatcacttgaacctgggaggcggagacggcagtgagctgagatcgtgccactgcactccagcctgggtaacagagtgagagcccatctcaaaaacaccaaaaaccaaaaaacaacctcagaggagattgcctaagtccacagagcaagaaaggaaattggggcagagtaaaggggtgagtttcttcttctacctctggccagtgtgtaaggatgggatgctcagagctagcagtactttgggcccatgaggtcatgctaagcatggcacagcagaaaactggaaacattttggatccttgataacactgttgagttactgcattaaccaagtctgcagccaaaccgctttgaggcttacttctgtggaaaataaatcttctcgttgagctgagttttctgtcattagcagccaaaggaatcctaactgatatactgagcaaggcattcgttattcactcggttaatccagacttaaatctagttactaaatctaaatttttataaaagttacttacagattatttaatagtcataatatttgtaaaacattatggtagaaaatgctgtgagattataattacagttataattataggatggaagaattacttgtttgaatttattcacgtatcatgcatttcatgatctcttcctctgtactcagcactgtgccctctcacaagatcatcacgggctagtgacaaatgatcagatacaaaaatatactatgagtcagcggaacgtgccacgctttaaggcagacaaacatgcagctggcccatggggagggaggaaggactagagggacacggggacggtttttcaaaccaggcaagtggagacgagagcagaaagaaagagcagcttgcgcaaaggccctggggtgagtgacactgtgtgggcagagtgtgggctcagggcgtggggtcaggcagagggaatgacgtttgttctcagcttaacaaagaggccactgaaacgtgaagccaaggacgacagggacacacttgcatttgagaaagttctcctggcagcagggtgcacagcagaggaagcagattcggggaggtgcccctgtgacagtcttgtggggcaggacagtgtcctcatgaagagcaaaccgcagtggccacagtgatggagagcaagaggccgaggtgggcagtaacactgggagcagaacttgccgcagacccacgggctgaggggaaggaaatggggccggacgtttccaggataagtccttgcgtccacaggcgccacctctgagttgctcctcccccttcctcatccctccattttaccacctcgaaatcaaaatcgaaatcgaaatcgctgagcttttacacagttcactcagatgcttccctgtaaatccatgacttgcaaaactgtcaggttttattccaacatgaccacaaacatggaaaaacaaagacatgtgtaaattatgtgagatgagaaaataacacataactctaaaaagggaatttcatttgcaaatgttttttgaggcagaatctcactctgtcccccaggctggagtgcagtggtgtgaactcagctcactgcaacctcctcctcctgtgattgttgagtcgctggggctacaggtgtgcgccaccttgcccagctaatttttgtacttttagtagagatggggttttgccatgttgaccaggctggtctcgaattcctgacctcaagtggtccgcccacctcagcctcccaaagtgctggggttacaggtgtgagccactacactcagtgttcatttgcagatttttttagtgtttggtatagtttcacaccataaatacctcacatccttaaaaatccacaggaaaaaaactaatattcaagaactagaacaattttttaaaatatgaggaaaatgagaccataatttttaaattataataattttaaaaagacttgtgataacggagagccaacggtagtacgtgaaagtgaccgtgtggggcatacttggttgtattcatgtttgtgactcactaattatcaatcacttctctcccacgtacaccttggcatgaatgagttagagaaccacggcaggagcccagtgtcattcatcaacccaggtcctctgcgcatctactgtgcctgctgctgtgggctgtgctgaggctgggatctgaggggctgggcacagcagggactcctgccctgacgggcactgcagtctctggggtagcacagacaagccagggtgcgttcactcccaggcaggaagggctttagaggggagagaaagccctacgggagcccccagaggagcccttagtctcgcagatgactgctacattcacaggctatgatgagcaagcgccagccagatacacagggacagacaagggtgttccgtcagggaagctcaggctaaaggccagtgagagcatggtcctgaggaggttcatttggctgctgtgtgagggtgtgttggagtggggacagggcagaagaggggtgctaggtcacatggtagagagccccatggagtttaccccagaagaggaggaagagcccgggaggctttggcaggaggatgccatgagcatcacctgggtgtgtctgcagaaggacgttcaactctgagcctgcccacctactgcgctcaccccaggacaagccaccatccccaccctggggagaaggctgcatccaccccaggagggtgacctgggtgtgtccggtaaagggtgtcttaagtctgaccctgctcgtcttctgcgtccactccaggacaagccaccaaccctactctagaccagggtggtcacctgctagcttggccgcccatggccattccacataaatccaaatccaatcatccacttctctgcttataactcttccaggcttcttactttcttgccagtaaagtataataaaacccaaactcctcgttctgcctacactgactctgctacaaagaccctgggtctcaccacctaccgcccatcccgccctgccccaccctgctcctgggctccaccagcctggccttcccttcattcttggaaccgccaaggccgtcccacctccagccttgggttctggctccttcctctgcctgggcccctgttccagctcgctctcaagctttggcttccagcttgaatcagtacctccctgcagaggcctttctggatagcctatctcggacaggcttgaatcagcgcctccctgcagaggcctttctggatagcctatctcagacaggcttgaatcagcacctccctgcagaggcctttctggatagcctatctcagacagggcctctctccactactctctagaacacctcatgctcattttctttacaaaacttctgataatatgtgattcttcttccttttctcctcctccacatatttctcctcctcctcctccttctcctcttcctcttcctccttctccttcatccttttcaccttttaaatgcttgtctccagtaatcacaatataaggccctaaaggacaggaactttaacatcccagaggctgctgtgacacagagcccagctcacagtaggcactccgtggatatctgctgcccttgttgaataaagacattggggaacgaggccaggagaagcagggtgtggccgaagggaagtggatgaactccagggttaaatttagaacaaacaggatttcaggattgatcatttgaaaggaaagtttctaccaactccctgagatacactaagtttgaaaatttcaaggacaaatagctataggccaatttttaaaaaaaagtgctgagaggctgttccaaaaccctgacactgctccggtctctgagaacacaggatggcctggagagtaaaggaggggagcatgcaggggaggaaattcggcagcatctgtgctgagcacccttcctctccaccacctaaagggctggggaggtgccgcctctgttgttgtagcccaggcaggatgactttgtggggccccttggggagtgctgatatgctaggaccaggtggcttaggtctggcttccactgggaccatctggaggggaacgcgaggaggacagagaggctgtgtggtggctgaccctgtccgcgcaaggcttgttggccaaggacacacgagtgcttcctacaggccgggcctgggccaaggaggggccatgcgaagtcctcagagaccctgcctggagtgaagccaacagggacctccaggagagaagggtcaggctggggaagagaggagatcagtcgaagcccattctctcccctcctcttcctcattcctggctctggccctgagaggaacaatgagccgagaggaacaatgagcaggtgccaggtcgggggagagggtggtaggggacacacaaggtggagagtaggagagccagcaagctcagactgcaggctgcctgcgcaggtctctgaaagggacccatcctgaagaccggaaatactaaccaagcgctcagaacttaaagtcagtgtgggctgtctgttgtccaagagtgggaagaaaagctgtggaaagtgatagggtcctcactggagaagggggcgtttgtcccactggtggacattgaaatgtgtgttttgacccaatctcaagccaggtttgttcaagtcaatgaggtgaggaagcagaggcaggaaccaagaagcgggttcagatttgcagcataagaccccgtgtctcagccgtgggggccgcaggggacagagcccactccccaaagtggggatccagcagggcgctgcacttggcctgagggcggggctgagggaggaccccataaccccctggatgaggaatcgtggttgaacactggcgctaagcagggggccgggagcgtgggaaatcctctgggagtttgtggccacagccagccttcgcccaggggcacggcctcggttcaccgcctgtgtgaaaacagcagcaccaactccggctgacaatttaaagtggtcttgagttgttgttgccctaggtgcctatcagaaacaatcacaaatgctttctagaggaatctgcattagagccaggcttcaaagaaatccctcagacacagctccaaggagcgcaagctcgcaatcactgtgcgcaaaatccacaagaccgctgaagtcaggagcacagcccgaaagccagccagccgcagactcggctgtgagcaggctccagccactggaccctccaggagagagcagtgaatgtcagatttgataagcttaaggagataaaagcaagatatgaaaatgccattaaagacaagagactcaaagtgaccaagcagataaaaaaatgaacaacgtcgctcttgaaatggaaagacatgaattacatatagctgagcacgtgtaccatttattaaagagcaaattagatgtagctggagacaggcgaaagacggatctaaaaacgaccgcggtaagcaggagcctgtgatggactgtacactgggaagtaaaatatcttgaattaaatttctacccgctgttcagatcctatgacctgactttggctgaaattctgagtctctagaacagtggttctggggcggtagaggatgggtcccaggggacgtctggcagtgttagagacatttttgattgtcacagctgggtggggctaccggcatctcgtgggttgaggccgggcactgctgaaccctctacagtgtacaggacaggctcattaccaagacgtgtccatcaaaaatgtcagtagtttctgttccttctgctcagtttgtttgagaacctaaaatggctcttaaaaaataaagtctatttttaaaaatgttgatggtgaggttgaaaaagctcactttaggatgaagagggaggaagaagagggaaaaaaccctgttctcaccaggtcgtcacctatgcaaacagcaatttcatgcagttaaaccaatatgtggaagggctttataaatcataaggtgctcaatggagttattcgtagaaatcctagagtttcacacagaaaattaatgaaatggctgggaaggcagtcgactcccaaatatgagaatttgtatctgaaaactcccctattcaactgtattgtcttatgcaaggcataaccatgtgccccgctgcccaaaccagaaggtaagacttaccgtgacctcctgacacgtccttattccctacgtctctagttactgagatttgtcaactgtgccttctacatgttttccccgtcttgccttctttccaaccctgccctccataacacagcgtgggtcctccttagctcttgccagaaaatagtaattactggctaaaggctttccctacaacccacctgtggtcctgccaccagcctgatccttctagaagcgaatctggttcagttaccccagggcatgcatagctccagagcttggaagcttggaagccccagactctgttcttcctagccaggccttcttccatgttgcgtttgcctctcctccttcctccagggtgcagtctctgctcctgccccgctgacttactcctaagaagatgaactgtggtgtctccgtgacatcattcacgcagtggccacggctgtccttcctgcccgctctgcctctgcccactggccacatctccttccagcatcttccagacccagcattgctccaggaagccacaccgagatcactccaccccacaggccctgttggggtctctcctgggttcctctagtttgctcactgtgctgtattaaaactttgggttcccctctctctcccaccaatgttaaactacttcagagaagcaagtgtccgtagcgttccatgcgtgtgtgtaaacagacgttactaggattattttcagtgggttgctgattaggaagagctttggtctacattattatttctgtgacacatttatctacgaaagagacacagcgaacccccttatgcagtgaagatggtgaggctctaggaggttaacacagaaataagggacttttccaagcctatacataaattatagaggaattcaaaaggaagggagtcagcaggaaagaggaaacaggttacaactatagcaggaaggatttctgtagcttaaaaaggaaaaaaaaaacccatcatagaaaaatttctcaagatctggcatgggtacaaaagagaacataaaatctttgctagatttgttttagcaaattttcattgtttaaaaatatttcataaacacctatagtatttcaggcactaaatacctctactagagatgagaacttgatgaacacgtaaaagccagacagggggagctgagaatagcccgtgtggcagccccgggagaggcgcgccctgtggtgcggtctcctcctcccctcatcaggggagctcgggaggaagctggggctgggaggcagcaccgcccttccctgctccgctgggtttttccctgttctgggcaacctgctgggtcacgtatgtagagagagccttcccggaacacatgagaatgctagataaaacaagggggaaatctcttctaatgaagtgtggctggtccgatagtaagcagggaagaataaacgcaggcaaaaatgaggataaggagatattgtgaggtcgagcactgttctgagcagtgcctgtcctgcaggcttatgtgagtctctgccatctagaccagaggttcagtggggggccaagcagggtgtggggggtcggatccgagtcggcattcccatagagcagactcaacggcgtgaccttggaagaacctcactgtgaagaaggaggcttgcatcttcaggtgggagtgtggcaaagagcaaggggtaaaaactgccctctcagatttctttagctcacacttcagccagttggaagccaaaatcctcactgctagtatggcctgaaaaactccaatccaaacttatagtttttagaggttccagattggtagcacccagaggaccaggcagaggcaaatgtaagtacaatcaggaggaacatgctttaaacacgtgtcacagtttaaacgggaaatttctaaggggcatgagctcgcaaacataaatcactaaataatcacagatacaaactgtgggcaagagtcagcagagacaacaaattccaaaatcagacctgtacagatagcaaaggttaggaatttgtataaataatataaaatatgtgtcttcaatacatttgaaaaacagcaaggaaggttgaagcattacaagaaaacaagagattataaaatgaccaagcagatttgtaaaaataagtaaaactttaaaattgaaacagtaataatttaaataaaaaattcaatagattggccaggtgtggtggctcatgcttataatcccagcactttgggaggctgaggtgggcggatcacttgaagtcaggagttcaagaccagcctggccaacatggcgaaaccccatctctactaaaaatacaaaaatcagccagtgtagtggtgcatgcctgtaatcccagctacacggactgaggcaggagaatagtttgaacctgggaggcggggggtgcagtgagccgagatcacaccactgcactccagcctgggtaaaagagtgagactctgtcacaaaaaaaaaaaaaaaaaaaaaaaaaaaaaaaaaaaaaaaaaaaaattcaatagatcaattaacagcagtttgggcaaagtccaacaaagagttggtaaaagagacgttggatctgatgataattgagagaaagacagaaatacaggaaatatgaaaggggggttaggaaatatggaagatagaaggagaaaaatccagcatgcctctgactattagaatgagacagaagaaacaaagaaaaacagaaaagcactattcaaagaggtgaggcaatactgcagaatttttcagagtagataaaatataccgatcttcatatttataaagacccccaaaatccccaggaggattcaatgaaaagaaaatgatacctaaatacatcatattaaatatttgaaataccaaaaaccgaaaaaaaaaatctctccagagcaaccagaagaaaagacaacttttctacaaatgaatgttaattactgtcagctaccatctcaacagcaatattggaagctgagagagtggaataatatatgcgatgtgctaagagaaaataactttaaccttgaattctctgtcctacaaaaaaaaaatctttcacaaacaaggacaaaacaaagacatttccaagtaaacaatcgaagaaaattctcacttccagtgaaattgtgtgggtaaagctagacacacacgagctgcatgaaagtaaatcatttgtgtattgtataatttgtggacttaagttggaattgatgtcttaaatatgctatttaaaaatagcatatacgggacagtgatcagttaaaaccttctaatgttttcatatttttctgaagataaagaggcttgattacctttagacaaaaattcaatagattggttaagcatacatgctaaagtttccaaagcaatcaattaaaggaatataaatccaatgtgtaattgccaaactaatagaggtcaaagtatagaacaagaaaaaaatttcaaatgatagtaagaaagcaggaaaaaagacacctggaaaaagcaggataagtaaaaaaaataccaactgttgggaagggccaccgccatgggtcctgagcgtcactgcaccttcttgctgagtatgtgacgaatgtcaggcactgaccactgttaacccaggccattgctcagtgtcacatttgcagtgagcaaccttgggaaatgaggtaacattttcctccaagacaaaagcaggcttgctgacctcttgttaaagaacaccaggttccccaagctcagctttcctcaactgagatgcagttttactgtaaacatagaatgcatctaggcccccataggatgtggggggcaaaggagtcctatgcaaatatgatactcatgccattttctgttccttgaattaaaatgtcctttatctctgatcttccaatatccaccaactcttctagtagctattattgggctaattagtagtttgtaagtgaggcaaaataaaatcctagaccatatacaatctaaatagaaataaatcaaaatatgtaaaaaaataaagtcaatgttaatgagctaaactctctagttaaaagacaaagagtgccaaataggtttacaataaatttagttatagaaaaacatatataacaagatacataaaaagtttcaaataaaataatggaaatagatacatcatgcaaaaactaatgaaaagaagtaacattaatgtcatacataggatgcaacaagcattcatagatatagaaaaagcactacatattgatgaacgtttcaattcaccaggaggatacaataattctaagcttacatgcaccaaataatatagcttcaaaatgtattaatcaaaaaatgacaaaaccaaaaggagaaattgacaaatccattattatttagaaaaatttttgtctcaatatatgtcttgggccattgtatatcttgctactctcatctggacgatgtggtacctgccttcaattttgtttaccaagattaatactgaatcctcctaaagttctgacctccgctgtcagtccttcaaggatgctctctgtgacccccagacttagtcaggtgccctggcagatgctcttaagatactaggaatttcttagatgggaatacttacttaggtgtatgtgtgtgagcatttaattaatgcttttattagactgtaaaccctgtgagggcaggaattgtgtctccttggcaaatcactatacacagtgcctgttactgatggctgatctacttagaacaaatatttgctgaatggatagacgagtgaaagcagtcactgaactggcagccagatggccactactgcttttttgacatgcactttgtgccacaggatggaagtgcagaatgaggattaacttgtgacaattggttccctctctctcttctcctctccttcccttttcctctttttaagccagtaattagcacataaccttgggcaactgaggcaataagtcagtaactctacatactatttttagatttgctaagggcatacaacatgtactattcaaaaacgaaaagaaagggaattatctagtagggcacagatgttatattcacaatggtacatcctgaagttcaacacagggaaaagcccacatttcttcaaatcaatgtgcgtcccatttactgtgcctgctcccccagtccatgacgtcacttcttccagttattcttgtgattacatgtccttccgggaacaactggctggagattctggtgacttttaggaagtttgaggctccaatcctatcatcattttccaggagcaactgctttagctaaacctcccggtattctcagggaaggatctgacttaagttgcgtgaaagtatattgcaaatgtgttttggcttagacgtattttaaataagggcccatacatattaaaaagtaaagagagaaattacagcctaggggtttgtggtgtccatgtagcattaacataatgagtgctgtggcttacttgcatcctgcaaaaagccaccttgaagtcctaacccctagtacctgtgaacatgacctcacttggaaatagggtctttgcaaatgaaatcaagttaacatgaggtcataattggattagggtggctctaaatccaatatgactggtgtccttataaggagagacacatacacacagaggaatgcctggtgaaggaggaaacagagattggagcggggcatctccaaactagggaacaccaaggattgctggcaacaccagaagctggaaagaggcatgaatcagattcttccctacagcctttagagggagtgaggcactgcccacccctgattttggagttctggtctccaaaactgtgggaggacaagttcctattattttaaactgtccaatttgtaatgctgtcttatggcagacctagaaaatgaacgaaactacttacgcatcctttaaagctagctattaaagtttcctatttgataaagacttgaaaatgtaacaagatgcataatagcatctacaagtattcacctttcaatatgaagaatggcaaagggtgaccaggctgccaataagataaattatggagctggaatcagaggcacaacgttagtttttgaattaccagtcgtgtgggggaagctgtttaagtaaaagaacactgagaatgggatcagaacacttgggctggagtttccgtttagccgctttctatatatttcccctaagcactggtacaccctgttccttctgccagtcacaaactctccacctcccctcctctctcttcaacctgctcacctctgtccctctcctaggccttggctaagactccactcctgggaggtctgccctggttcctaggctgggttacaggacctcctggagcagccctgccatgctcacgggaatgtgcccccccttctctggatctacctggagatgggggcactccaggaagcctggccccagctcatcatagtccatgttgtacccacagagttcttggcacataagaattcatttttagctctaaataagtaaaggtatgaattaaacagtagcattaactttgccatagttttgcaaactcaaagtgtggtttacatgtgtcaacatttcaacttaaccacagattattttgcctcccaatggatatttggccaagtctggagaaacttgtcagaaggtgaactaaaggatgcaaagacaatctgtgcgtgcccctcaaagctgccaaagcgggcctggagtctgcaagtgctcgttagaacaaaacgtttgcttctagggccagtcctctgtgcaattagagttgtagtggtgaggttgtaaatcagagttgatagctcctattgttagggaatttagctgtaggaattgggaaatttgccatggtccctgagcactgaacccatgacccaggggtggcttggtttccttaaacttagtgcccatctcagttgatcagagggcatctatttcagtctctcagatcacgtggaatctcttgatcggttccacatggaccagcttctgacaccctggctgcagaacagaagcggcggctgggagaggtaagtctagacccaggtagcagggacccccctggacccacacgcccacacggccattgccctgagagccaaaccttccaagaggccctgaaagagaaagaacacaaccagccaagcttgggactggacaagccagtcagcagcactgaaccttacaggataagtcctaggccacggaggagccagtcgaggtcagcctggagtcttctttattcatgacattgcatctgtgcagcgcaagggccccgccaggaagacctggtccagccgcatgccttggctggggcccctgacacgctccttcctggggtcacccgcgtcccagcctggcccttctgggccacggtgcagctctcagggaccttcttcgtttcaccaggggctcctcacaccagagcttaccccaaagaagtgaacccctaagcccccttcagttcctaggatccttgactcctaccaagcaaacccttttgtcctcaccccttttgaatctcctttgagatctcagaggtaggcatctcctgctccattctaattcaggcacctttcccctctccagcaagttctcctgcttctcaggccgtggtgggtgtgggcctctgtgcgagccgctcccctgtgtgccttcggccgccactcctccctcagctgctcgcattcccactctgtcctttctccaggctgacgcccagccctccagacctcctaccccagttcagagccacaggtcccaaagcctccgtggatgtcctccaggcactgccagggaagaattattccacaaatatctgtatatcagtatgtgccagaaatcgttctgagtcatgccgatctcccagttcaccatcttttttgccccagtgttctcctattttttttttaactctaaaccactcagtaaatgacactgatgtcatcatgatcacagttcttcaaatcatcctgatttctcccctttcacggccctcccaagcccagccccttatccacactttgcatcctgtgcgtttgatcgctctgtcaccacacgcccgcctcgtccccatggccgcaatggccagaggcatggcttcatctcttcttgccgggttagtgcagttctctgctggtggggatgtgggcctccaggattcctccccaatctgtctgcaccgctgttcagatgtgttttaaaaattcaggtctggtcaagcccttccctactctacaccgtcaataatttcctgtacttttaaggataaagttcacatctctcagctgaccacgcaaggttctacatgcccgttccacctctttccataccgctccctaacaggaactctttactactgctcttaaattatccaaacgtagcacatttgaaaaatagccccaccatttagccaattgcctctcatcctttgaaacttttaagtttttccaggaggcttcctatacccacaggacacacatacatgcacacacacacacacgcacatgctcatacacacacatgcacatgcttacacacatacatacacacatgctcacacacatgcacatgctcacacacgcacacgcacatgctcatacacacatgcacatgctgacacacatacatacacacatgctcacacacatgcacatgctcacacacacgcacatgctcatacacacacatgcacatgcttacatacatacacacatgctcacacacacgcacatgctcacacacgcacatgcttacacacatacatacacacatgctctcacacacatgcacatgctcacacacatgcacacgcacatggtcatacacacacgctcatacacacacgtgcacacacacgctcatacacatacatgcacacacgcacatggttacacacccatgcacacatgctcacacacatgcacacatgctcatacacacactcatgcacacacacgcacatgcgcacacacacacattcacacaggcacacacactcatgttcatacacacgcatgcacacagtatgcacacacacgcatgtatacacatgcacacacacatacatgcacacgcttctcctcactccctgatttttatgctgtttttctgagggcctggagaacattgtgcacgcctccatcttaccatatacaactgctgcacaatctgcctttgtacctgagactgggcaagaattacttgagagcagaagccatgtctcatttgacaaacaggcagctggcacgggaaggggacgggcatttaataaatgtttctggattgaacacgtgagtgagttcgtatattcctgaatgactcgccattttagtattttcacctatcaccgccacgcagctgacttcttaatctgtttccagctctgccctctctcactagctggaatcccgtctccaactctctgcagccgactccatctgcgcatcactccgatctgtattacagtgattactccggcgtctgcatctcgtcctgaggtcctgaactttgggatggcaccgaccatctgtgactgtccgactcaaaacatcggtgcctggcacaggaagcatctcattctgtctctcctcaccccccttatgcatttcacccatcaccaaggcccatagagtctaccttgcagcgtctcaccaattcacctgtctctctaaggccactggcacctcatgccagccctactaatgggctccttccttcgcccctcctccagtctagtcaatatgttaccaaagcattatccctctccactgctctgcccttcaatcatctgtaccacaaaatgtgactcaataaattcaagctgctattccaaacgtggcctcatttgtcacaccagcctcaagcttcatctcgcaccactcagagtctgctccacaccaaacccagcaggaccaggtagtatttccacatctgcccctcgcgttcctgcccctgcgcccgtctgcgctcctgcccctgccctcccctcttccttcttcttagatcatctatccatcttttaagtccaaacttaaataggacctttgttcatgcatttcctcatttcccattaagataaaacttatttctcctgtgaaaccctgagcactttataaccactgcagtataacttgtgttctaactagaatctgtttccgggtcatcctccctgttaaatcccatgctatgtatcgtaattcccaacaaaacaaatgagcatggtgctgagggaatcctcctcatggtatatagatttccagatttttagggaatgagagcctaatgtcaccctatctgacatttctgaggccaatggtcttttaggggtaatgaagaattattactatgataattatttgggaattataccttactcactcatgcaacccccactcccagggcaaggccttgcaggcaggaggtgctcagtaaaggaccatgcaatggatgggattgtagacccagtgagctgaagaaaaaccagaccccggggggttttcgttccacatcaagcaggtgagctgagaccacgggctgtcttccttggaaagcacagagaacctggcacgattgttttgctaccaggactgcagggctgtctttctgcgaactttcattaccagaggtttaaaggctcgccagcagaaacttcagaactgcatgcccaacatgatctcgataagtagtgggtcattgcggagggtagagagaagtagtctctgagttagtcttattaaaacaaatctttattacccttaaaagaacattggcctcagaaatgttagatggggtgacattaggctctcattccttaaaaacctggaaatttatataccatgaggaaacttccctcagcaccaggctcatttgttttgttgggaattacaaaaaaaaaaaaaaaaagcacaattaacttgtaccacaagatgctgagccagagcccctctctactgcggagggaatgagataaggcctcccctggggtttctattctggggtctcccacaggaagcctttcatcaccacattcttattcatagacattgaaacaatactagcatttaatttgcaccaggaactggggtagcaagaagagggggcattctccagctgtctagaggtgggagggagggggtccatgttcaccgtcctcttttcacggccatcactttaggctggaggtgggagggaggggggtccatgttcaccgtcctcttttcacggccatcactttaagctggaggagagaaggaggaggggtccgtgttcactgtcctcttttcacggccatcacttccgggtcaggaaatgatgatgactgttcaggcctgtgtcctgccttcactagggccagccagcggcatccatatttttgcagtgttgtatgtgagggtgaactgagtcaggcttgcccaagtaggtggcattctgctggttcaggaaaactcaaattgttggcttcaagttcacttggttctctctctgtctccagtcctggctgaaattctaagtgattttttacttctggagccatctgtaagaaaggctcttcttggaaccctgaagactgcaggtctcgtttgggcaggtgagagggatttgaggtgactgaacagaacccatgaggctcaaggtggttgggtttaatactttgaacctgaacataggaatagatcactttttaaaattgttttcagcacctaaaattatggccatggacagctccatgcaaaggtcccctgactacaaggacctgccccgtgatgtggttgtgttacccagaccctgcctgtccagctgtggaagccaggctgtcaatccgaaaatgtcagcgccttgctcagatcactccagtgtgtgaggatcacaatttagataagaacccagatttcttggtttaaaattggtattttctactttatctcatacttatatcatatatatataatttggtaaaaagcagaacatattctctacttctagaggctccatctgcaagcatttgtacaattcagcaagtacagaaaagtgttggatcatgtgggcagcaattcaaagatttttttaaccaaattatgcaattatctcaatgcacaggattatgtaagagtatctaaaaaacaggttattacaagcaataaagtcagagatttgcagttgattggttttctatgtatttctaaacttggcaatgggtttgtaatacccagtgggctcttttgttgcttagcttaacgtttttcagaagtagacaattcttcacgggaagacaacggaaatccaaggaaagctacgaaggctgttatcagagaaaaatttcctcgaagcactttagctgtcactttgaagtgttagtgacatcctttggcagtgattaaatgtgccacatgccactaatcttgtttagaatccttaaagaggacagcagcccttacacaggatgcttcgatctgatgacgatggtgtttatgcagtgatgtgtggctcacaggcacgtatacaacaccatcaactcttccatctcatacctcatcagagctttccatctgatcccatttggagaaggatatcacacctgaggaatccacgtgtaagctattgctcttgtatgagttcaggtgcacacgcactgtggacgcacactgcactgtgccccccaacggctgacaacgtggagccgggatgcaggagcatccgccttctccaagtgagttctcggcactgccgtgctttcactaaccctttatttacttctgctagtagactttcaacgccactgagtgctagaagaatttaagaatgttaaaatagatatgatgagaatactgttttttgaacatcttcacatatgaagagtaaaagtcagaggatagagcttcggattatctcatagaagaaaaacaccttcgcattacatgtggcatgagccattcgcgggtattatatcttcttcatttgctattgttttcttttaaagcatctcaccaagcactcgcttcactgtgcattttatattctggttttatttcccagttcacaattttattcagaatcttaaattaactgtccttgggaagtatacaactagttttacccaaaggatggctgaaaatgcattgtcttcaacacaagataaattaacctgttttccttgcgatgtttcccatgaggagtttgatcgtttgcaccttattctcttcggggaacttaggaaaaaccacatggaggttgtcttctcgatggcgcaaccatgaactggacacgtttcttgacttaatcaagttatgtcctatttttgcccgtattgatctttatgtcactgaaagccaatgtgtacatttgtcagtgtcagagcaccctctgaccaactcaactctgatctcttgttgttaaaatcccacccggtgacctgcttgggttcccccagctaggcgagagttgagtccttagtaatttcaggcggggcccagagatcatggaagagatgcgggtagtggtgaatcgtaccgagattttcaagctccatcttaatcagtgtagaataatggaagcttttttaaattcagcaggcaagcactataattaaactcgcatgtcatcaatattccatcagggtgcaactcagccgcctgtctccctgcctcgtgccttgggtggctgggctgtcttcatcatgctgggcccagcagcaggctatttgccagggcacccactgtggacactctgccttcccagggtagccccgggccacagaacctgccactaggcattgcccattattccatttttctctcctaatgattttctgttgttgttcagagggagtctcgttctgtctcccaggctggagtgtagtggcatgatcttggctcactgcaacctccacctcctgggttcaagcaattctcgtgcctcagcctcccaagtagctgggattacaggcatgtgccaccatgcccgactaatttttgtatgtttagtagagacagggtttcaccatgttggccaggctggtctccaacttctggcctcatgtaatccgcccgcctcagcctcccaaagtgctgggattacaggcgtgagccgccctgcctggccctaataatgtttttaaggaggtgaataattcccatcgacttaactcatcccagagatttaggtccagcagagccaggcccacacagttattgaatcagacacgagaagacggaatcgacatggcaatcagcatttagacaggctactaagtgctgccatcaatcaccttctcttcccagaaaagtacagatgtctccctggatttcttactaataaccagaaatacagctgtccaggccctgcacatattttgtatcacttgataaaaatagctaatagcattctatctgtgactcctggtttatctcataaactaaatggatggaaaagagaaaggaatgctacttgaaatcccatctcagcggcacatgaattccaggtagcggctccctggttacaggacagaagtaagtgaagtagcacacacaagagaaatatcggaaaacagaaaataacttctagaggaataatttgttgcacaaaatgcaaacaaaacatgttcattaatacgttttatttaaacatattttcaaatgcttacaattgtggattttaggaggctgtgcaaaaatcatgaatatttttaatctgtcttaacaggcttctctcccacctctcactgtgatactgagcagaactccccaaagaaaaatcatttctcaactgtgaaactagggaagactaaccagatgtgatagcacactgtattctgatcgaaagtgaactattcttccatcatattggtcaagctttcaaaaacacttacctatacttcagggcgaaagattctcagcatcctctaacaaatgtttgcctcagaaccattgaaaagaaaaggtttagaattaatgacagagaacaatgtacccacagctgcattttgctcttttgaaaattagatatttttctgcagataatactacagaaccacaataaaagttatcatcatgcttcacatctagtaatgaacgtgaaacaagcaccctcgaatagctgcatcgagcatgaaagggcacgggccccactgccggccgggtgaattctagacgggccccactgccagccgggtgaattctagcagatacttcacccaaaatgcttcagtgtgcatcaaactgacacgagctcctacacaatcacaatataatttactcgcctgagagattcagtacacaatgtccccagtttccccccaatatccttaaactgatttattctgcacaattccatcacaaagtttttcacttatttgtcgaatctcaacagtattcttgaatgaagtatcctccagtttttgttgctgtttagacatttacatttatgaacaaagagttcagggcagctgctctgtagaatgtttcatagtctggactgatttcgtggtttcttcataattagattagggtaaaatatttttagctgctgtacatcacgttaggagacctgtcatgtcaacttgcaccattgtgggagacactcgcttctgcctgccgggtcgcctttgtgaagataacctttcccatcgtaattaataagtaggatgtggggcaatagctcctcaacctttcccctcatggctttagcacttataaaaaatgtaaaaaaaaatatcaggtgtccattttcaaggctgagggtgggggaagaatctaattaactttgaacagcacctggatggcagaatccctctagacactgacaacccaccgcaaccccaaactttacaactatttcacccaactcttttcaacagaagttctcatttttgttcatatatattgaatatttccaaactattcaatttaccttccacagaaattgctcctttttattactcaaagttcatcggatcatagtaattaatgatcatacttcagtgtatctagggtaagactgactacaaggtacatcagtagtttacatgccctacaggaagaaaacaccaaggacacataacaagcatcactgcaccacccacaactgatgttggtgacaacgtgcagacacaatatttgcacccggagtcagtgaaatgtggtgaatgatgtcatgtgtgcaaagtagtacaaacaggtcagggaacaaacagagcggactcctgggaaccacgtgtatctccagtggctgccaactcaggccggtctgcagaggattctgccacagcctgggctggaggctacacacctggctggtggatctgagacagagcagggcgggtaactgaagaccaggctggaaaggttctagcttcacataaggtaccaaataaaaaattaaaactctccatcagaaccaagatgcatatgtctttcttgttataattcaaaatatctcatagctagtaagatcttactgactataaaaggttggaaacacatgaagcagccaggactcccacactgggctggcgagagtgtgaacgggcgccaccagtttggaaaacaacaatctcatcaggttgaagatgtgcaggcccacggctcagcgactccacctcaggactacatggagcagagccccagcaggtgcactcggagacacgcccaggaatacctgtagctgtctttgcaggatagccacacgccagaagtcaccacaatctctagcaatggtggaaggaacaggcgccctgcggtagatacacgtggcagaacactacacaacagtgagcatgggctgcctgagtgtgcacagcacacacctctaaacacaggggaagctcacgcctagaaccgtgaacaaaggaagagagacacggtggaagctcaccgagagcttcttatttacataagcctcaaaaacaggtaaaacacagcttattgcttagaaaatgctacatgggtaaagatataaagaaaacaaggaaatcattgacagaggggtctggcgttagcggtctctgagaggagatgaaagggagggaggggagaggcagggaagaagaagaagggggaggagagaaacaagagagggagtgggcaggacgatggtctgggaaatgctcttcgccccaacccaaaggcgtcttcctctgtgaagggttgggcgggggtggaactcggttcaccccaggggcctcccctgccctgcctgagtggtgtggctcggacacaggggcatctccccacaggcctgtgcctcctgaatgaggaacagccattcccctccagcagggcctcggcaggtgggcccggcaggtgctcccgtgactctgcctccgcctccagccctggtctctgggatgcgaagatggatggaaagaccatatgaagcagccccgatttcccggagctcccagctgaggtcgcattcatccacacaggcaacagaagcaagtgcagcactgcgcggttcacctgctgtgggaacggcaggccagaattccctgtggaaaagggaggatgggaagggccccgatccccagcccctggctcaggtaggtgccatcgcctcccagggccgttgtccagattcaccgcggtgcatgtgaaagcccgggcaaacagatggtgcccaattaacagaactattcttgcggcactggggtttggtgagactctctctgactcagagaaatgacgcaggatggccactctgtccttggggccccaagcctagaatctgagtctctgactccctgccagaacctggtcgagaccttgaactctcctagctgcttcctcacccaggaaacgggaagagccccacccccaacacagagacggtggggagcagggctggagctgcggagcaccagccgcacctggcgccaggtcccaggagccacacgaggaaaaggagaacttcatcatgggctaggaaacccactgcctgggcgggcgagggcatttctttctgtttggaaacacacagaataacaagcaaagttagataagggaatgagagtccttgtgaggggtaaatcagtgttagatgataattgtcctgcttttgacgattttctaaaaacaaaacagaacaaaaaaaaaaactttagggaagctttaaacagatacgagagaaaagtgtcttattttcaacgacaaaaatgaaagtaaattcaccaaaagatggtacagatgaagctcaaatatttatgataacaacattccttggttgtagaaaaagaggaatacgtcctcattgcctgaaactaacgacacggaacccttgtgggaaccaggggagggaggtgttggtgagcagttattatgatggttaatttaggaagttgtaggaaggttctgcagagcattcgacagatgattaaaaggacaggagccggacatctgggccttgtggtttctaaggagagtgtgctaggcgttggaaggagaagaacgggaagaggctgagccctggtgccaatttgcctcagaggtgcaggcagatttcgctcacttgagagcagggcgagttctgcttttgaggccagaagtcatacaaatgcggacaagaggcctgaagaccgaaaacctgaactgcagatgtgtttctgcagaaaacctggctgggaggaattcacttttctttctttttttgagacggagtctcaccctgtcacccaggctggagtgcagtggcgagatctcggctcaccgcaacttccacctccccggttcaagcgagtctcatggctcagcctcccaagtagctgggatacaggcatgtgccaccatgcctggctaattttgcatttttagtagagatggtgtttttccatgttggtcaggctggtcttaaactcccgacctcaggtgattcgcccacctcggcctcccaaagtgctgagagtacaggcatgagccactgtggccagcccaggattttttactcctgggcgtgatttgtgttgggggtggcaccaagttgatggcctcggtgaggaagcagggtcagccctgctgagcccagggtgcatccgtgactatgctgaacgctgcatgtgatgcccgacagccctgtgcacagccttggcccactgtacgcagagatcacaaggcttcccgagccaaacccttcaggatctcacagctgcggagctggtcgccgtgtcactcagctgtcagctgctctctccttctctggtgtttcatggatacttcactttatgcaaatcccacaaatgacacaaggcaggggtgggacagcatcgggggtcagagaccacttcaaaaccacgcactgaaaacttttcagacaaggccagactacttgataaaagtcatcttccatgtcaggatgtaccgggacaccctggcagagccagcccagggcacggggagtaggagacactgataatgataaaaacatgcgggatgggagtgccagggttcgcctgtgcaattcaagagtggtttgtggtgttgaagttggcaattctgaccttcatctgtgcaagggaaacttgttgaactatttaagtccgagaaacttaaggccctaaaccctccgtgttcctcaacggcatcactagagagactctctctggaactcgcccctgctctgtacaagacacatgggtcagcatggggtgaggagagctctgggcaaagggcagacatgctgggaacccgccccgacacgtgactgagtaattagataccccgaccaatgacatccacaggcttccccagaatcatacatgcttctccggtaaactgtggtcccagtgacccttgggaggtaagaagctccccacaacacccccccttttgtggcgcttacatggggatcacagagtcaccaactgactgtgcaaattggacaggtgtccaaaatgaagcactaatgagcatgaagaaaatgagcatgaagtcagacaggctaaaaaaaattaagacaaaaagtgccatttcccaatttcagccctattaattaaaaaccaaaattaaaactgtgtggaatcgctcattatgtttttaaattaaacacaggctgacaaaactaattgcactaacagtctcccccagctgttccctgctgacctctgcacagttctggaaggctctgggtgaggggtggccggggaggggagagggggccatcctcaggaagacgatcgtgcaggacagagccaaggccactcagggaggatggcttttgttgcttttacttcactaacctggaaagaaagtatttgcttccaaattttgtcttgttttccaaacagaggctgtagccataaatatgcatcttattgaacatctactctgtgcaaggcatagtaggttatcaatcattccagggagtggagcgtaaggagaaggagagtcatctggcaccaagaactcagagctgggggagtctgtagttatttttagtgctgccactggtcagtggacacgggtgggagccagcgctggacggcgtggtggcttgacgtcctttgcccaggctggccctgccgccgtacagctctagcaccgactgcgggatgggggaccagcgaacctcgggagcccactccctcagtgacagcatgcggtggtagctgctcttatctcactggctggttgtaagaatccaagtaaattaagaatgtttaagaactaatacattttttgtatttttttttttttagacacaaggtctctatgttgcccagtctgaccttgaactccagagttcaagtaatcctcccagctcagcctcccagcgtgttgtgctcacaggcgtgagccaccacacctggccaataattaattctataaactggaaagtgttaaacaaacatttcccattaggagaactgaggaattttaaactctgttttactttttttccactactttcaatagctcattgtttcataaattagatggatacatgatgccactttttaaaactaaagaatccataattgtactgcccataagtaatcagtgctattgttctggtccattttttctaatgtgtaagtctgcctcctgtatctcattgtgtgtgtgcatgtgtgtgtgtgtgcatgtgtgtgtgtgcgggttggtgtgtgcgtgcgtgtgtgcatgtgtgtgcatgtgtatgggcatgcgtgcgtgtgtgtgtgtgtgtgtgtgtgtgagagagagagaagaagggagggaggagagagattactgaacaaatatttgagtgtctgcctgtcacacaagacatcatgccaggcatagccttcctagggacacagtgacaaccaagataaacacagctcctgcctcataaggataaattctatttgaagaaacataaagtgaataattacctacacaattaatagtgtaatcacaaaaaggatcagtatttcaaagaatcatttgggttacatgagagtgtgtaacagaacacccaccaaacagcctttacagtatgtgctgttcttgagcccaatctcttcccttagtgctgtctagcaggcgtttcctcgggttttctgacggctgcataatatcctctttacctgggtggcatggtttgactactcccccattgatggatttttttttaaataaaaaataacagcacagagcattcatgaacgtaaatcgtgagttaattccttatggtttgcttaaaatgcgttcctgcaaattggagtactgagttaaaagtcataaaaattttgaggttaatgagacatatgtcaacttgctttgtaaaagggtgaaccaatccataatcttacctcgtgtttctcaaataatgcctgttaacattaagtattgccctttaaaaactgccaatttgtatggccaaaatctttttctttttgttgttgttgagacaggctctcgctctgtcgcccagcctggagtgcagtggtgcgatctcagctcactacaacccctgcctcctggattcaagcgattctcctgcctcagcctgctaagtagctgggatcacaggtgcccatcatcacgcatggctaatttttgcatttttaatagagacagggtttaccacgttggccaggctggtctcaaactcctaaactcaggcgatccgcccgcctcggcctccccaagttctaggattataggcatgagccaccgctgtatggccaaaatcttttactattttaatttgcatttatttgattagtagtcatgtttaaaatatttgatggctgtttgtattatttttctatttgtaaattatgtccgagtcctttgcctcatttttcctattgcagagtcagcaattttcttattgttttctaagagtttttggtatatgactgaattaactttttatcatagtctccctatataataaatataaaatctacatttatattttctagtctatttgccttatcatttttaaattttgacatattaatagttttcaatattttagtaagtcaaatcgaatagcttctttttttgtgagattttctttcctttgcatgcatgcttacaaagccttttctctttctgaaatcggttaaatattctagagtattttgtctttttttataattcagttatttttatttgactgtggcccatctggaagttgttttcgagtacactatgaagggaggagcttctttacccatagccaactttcccacatgttgtattgaatcgtacatatctctccctttataacacagtacatattgaagaactatttcaggatgttttactccagttcaattcctcgttaacacaaattcttaacgggactagtgagaatccctgctttgttcctgatttaatgggacagtattaagtgagtaaagataggggttgtttatcatattatgaatatttcttaatttttacctacttaatattttaaaatcagaaactgtctaaaatgttatcaaattattctttttaatctttgaagattatcgtaggtgttgaattctctgcttcatgtacctttaattcactggtattcttttttctgggatattgccattgtaagatttggctgctattacggggtgacagtcttttcagtaaggtaatttagctatccattggcaggcaaaggacgtatttgatgcaggggtggtaagagatgggttggcgcaggaggtatgaaaacttactccaaattacagacactttagatatctgctttctttggggacgtaagaacagctctgcttgcaaatccaatgcctatgttacaggagtgcagttttatgtttggaaagagtctcttagcattatgagggttatttatgttatgaacaccagttagtttgcaccagttccaggaaagagattcaatatgaaaatatggacacagattcagatatagtgttgggagtatatgaatttgacttgtgtatcatatacctggattctctggtttagcttgtaaacccaatatttcatcataatccagtaaaccaaattaactattatggactgaattgtgtgctctccaaattcatatgttgaagtcctaacctctggtacttagactgtgactgtgtggagagaggacctttcaaaggggaattccattaaatgaggcctcggagtgggtgcttatccgctctgactgctgtccttagaagaagaggaagtctgaatacgcagagacaccggggccgcctctgtgtatggaggaacggccacgcgaggacagggaggaggcgccatctgcaagcaagaggagagccacggaagacaccagccccaccaagacctcgaactgggcttcaagcctccagaactgagagacattaagggtctgctgtttgaactgcccagtctacttctaaaaggatgaaccaatccattgttaggggagcctgagcagactaatatgttaacagaaaactgagctgtctctactgcttctctcatcaaagatcagaattgaaaggtggccaagaaacaaaaaccaatagataatcttcctactgtatcatcccagaaggcaaggatgaaaatcttcactcaggtcagctttgctctacccaagggctattaaatgcagctggaaaagagagctcccaggagggcagaaaaacctgcgagtgacaatgaacgtgaatctcatagtgctctgcagcccaccccagcccccagaacccaggctttgcaccctgagaaagcacaaagcacagtccacttctctactgagagcgggttctccaccacggccaaggagttcttcagggaagatgctactctgtgagtggctggatagaaaaatataaacagggttattcccctctttgggtctttggtttgtcccttctccaaaaggaataccttattttccccaacagcgtggcttcctgtcgaataactattcctaccatccctctaagaacatgcaacaggggaaaacacctgctgggaagctgccgccagaggccccaccctatcccggaagggccttagaggaaggaagttggggaggaggaggagggtcagggtggatgggaggatgaacacagcaactgctgggacacaggcttcggcgctgcacccacctggagctgacagtcaagcctcacttgatgttaaagaaagaggaaatatggtatcagaaagagcatgagggtaaatggcaagacctgagtttaagttcaaaattgattattagctgtgggactccacaaaccacttagacttgagatgtctctgttttattatctgtaaagcagggccacctctacccatctcataggttttctgacagttcagtcatggttgaaagtgctttataaacattaagtgtcatagaggaaatttgttagaagcgttaataacttatgtgtccatctgcacattgcacataggataggccattctttttagcattgcctttgcaattgatttaatttcccaagctctgttcaccttctgagaccataacaaacattaccctgaagtttctgtttccatttccattggtcccactctaagtgaaccttggcaatcaaaagggcatcatcatccctccttctactgagcccagtgagctcacagctggaacgctgctccacgggactgaaagtaaacactttaagtttccgggtgataactgttggtcatggtcaatgtcagcacactcatttaagaggcgcattttcttggaaccactcactgaaatatacactcaacaccaaatgtgagcttcagaagatattttaagggcatcaggaagatgaaactgtgcctgccccttgcggcatggaggaatccacacacacacaaacatttctacacactcacacttgtattctgcttctgtgtgtttacatgttgtttcttgtaagaatagagattgcaaagctcaacttaaaaaatattgaatggtaacataaacaaattattaggccaaccacagagaattgcaaaacttttgactgttttttagttacaaaattcagttttatacattatatattaagaacctactgagcaagaaaatattctattaagtggtatttgcaagagattattctaatagagagtgtgctagaaaagaaaagaaagatgatacaacggatgaggcccctactggatatgaggtgcagagagccagctttcgcctcctgaacacagatagtcctcctgactcctttaggaacatgagctccattggaaacatctggaagttgaggataagagaaaacaagtctggccaggtgtggcggctcacacctgtaaccccagtactttgagaggctgaggcaagaggattgcttgagcccagaagttggagaccaacctgggcaaaatagtgagaccccatctctacaaaaaataaaattagccaggcatggtggcgtgtagccttcagtctcatagctgtcagggtgttcaagttctgccttccatacagaacaacatctgcagggctcacagacagaggaatgccccccaagatactaactcaggtgaaagattgtgagatttcatcctcaggtacacacaccatggtgtgacttacaggagcaccccgaggtgtataagagtgtccctaaattgatgttaagaatactaatgaaggatgaactgagtctctctgcagctgcctctgggctttgtctggtgtgcctatacccaatgtcacccaaacccaaagaagggtttgcagcagcagctgcacaaagctgctggacaaagccgaatctccaggagcccagtcccaccctcccctctgagaagacccccatgtgacttccccacctttgtggcgcatggtatgaagagtacaggaaagaacaaagggacagcagccagggcacagatgcaaactactttcagaaacgtgttctcttctgaaagactccagagccagtgcgaccctcattagaacaagcaccggagacatgaagtttgctactgaaggtctcccagcaagctgcaggcggccctgaccaagcttaggtcccatgaaatgagccccacttgcagagcttgttctgaacctcgttttggggagaaacttggttgttcatgtcacggagaaggaagccgagtgaggatgagaaaagcaaccttcacagaggcagagctggatcagaagaaggtgcagctctgctcagcacggcccccagcctgcttcctgggcaggaaattcacatgtgaaatccagtttctgagaggctcaggagccttctttgacatcatgatgatgaacccaatcatgtatatatagcttaaatcaagtggaaaagcccacatcaccacaggctgcgatctgaaggagcagagattagcaatctagaaatagaaaagttattgaaagccaatcttctcccagctgattgatccgcaaatgatggcaggaaaaagctgaactcacttcagaagttggtgtctaaaattggagactctttcagcaaggcctgcctgggtcacggggtctgccccatctagtgagtgctctgctgtgcatcagagagagggggcgggactggcatcttcccagcaaagtagggggcaagggagcactctgtaaaagcaggggatgatgtgtaaacccatccatcttcctagcgcatcaataataatgttccactagctagtcaggtactcagatcctgacatttgtcagttgtgtcaaaatgctagaaagtaccatttcaaatgctgttatgtgttgtttataaaatataaggataatttcaccaaagaagatatacaaatgaccaagaagcatatggaaagatgctcaacgccagtcactaatccttagggaaatgcaaatcaacaccacaagcaaatcaacacccgataagataccccctctcacctgttgggatagctacatcaaaacaaatagcataatgagtgttggcgagggtgctgaaaaattagaattgttgtttactgttggtggaaatgtaaaacggtgcaggagctctggaaaacagtatggccattcctcagaaagttacacatagaataaccatataatttagcaactttcacttctgagtatatacccaaaaagaatggaaagcagagcctcaaagagacatttgtacactcacattcatagcagcatcattcacagtagccaaaagatggaagcaacctcagtgttcattggtggatggatgggtagcagagtgcggtgtaggcacacaatggaaggaaatgacgacgcacgttgcaatgtggatgaacctggaggacattatgtgaagtgaaataagctgatcacaaaaagacaaatactgtatgattccgcttacgtgaggtaccgagaatactcaaatcatagagacagagagtggaatggtggcaccagaggatgaggattagggggaaaaagagttattgcttaaagggtagcatttccgttttgagaaaggaacggagttctggagaaagatggtggtgatggttgcacagcaatgtgagtgtacccaataccactgaactgcacactgacacatgcttgagacggtaaatttaacgtcacatgttttactcataattaaaaatttttaagtgtaaggataaatgtaactgcagtatatgtgcatgatatataacagcacatagttacacatagttatgtcgataatttcttattctatagcattttaaactacagaaaatatacctaatgaaaattactaatttgcctgctattttgttttaacatgcttgaaccataagctcaaaacacctgttgataccttgtgcctgcctttgaataaaacctaaatccttctaatgtcgccatagatgagatgtacaggccggatttcatgtcatttagtcaggaaaaatgtcacaggaaagcagtttctcatagatatcagctttcaaactttctacacctgaggaccacttgggtgggtctaagagagtgactgtgcaccccgaccccctgcaattgtggaaactcagaatcacgagccaaagaaggtaaccgggataaactgggtagaatcagcaacttttggagggaggggatcacacctttaacactacagctaggcgttttgaatgaggtaaaacctgaagacaatctgaataatgagaaccacagcccttggtgtcataaggaacctttcaagccagtgcctgccagactctgaaacccctgggccctgagtgtacaaagaaaagagggagttcctgcctgcgtcgttggtagaaagtaaagacacagatgccagaggggaagagcacagcccgcacacagcgggagctcatgagatgtttggagattgatgggcacatatacagaacacagtctcctggattaaagcactcagtgtgcagggtggggccagggaaaggacaatgccaggttcctggagagctggagtgacacaaacgagcaggaacaggactgcaatgccaccgagcagtgcaagcgaggtttggtttccctgagcatttggagaaactgaaggaaatgcagagtgaagacagcgttcctgaacacaaagcatgaggcgtgaagtcccaaatccaagcccaccctcgttccttcccttgtgtggggcccttggcacctcacccctcagttcatatggtggggtagtgttgagagcccgtcgctttcagccagattgtggccttttccattccaagccacaagagcgtcagacgtgaggctgtgcttcatggccaggcagggactcggcatctgaacgactcagggccaatcaggagagcgggaaccacagcagttatttcacagaaagtgtttcatacaaagaattggctgagtaaggctggaaggctggaaaggcagaggaacccccagtaaccccaagatggtaactgcagggaagcagctccttagaccgagggaagagggtggtgtcgtgacaacctgggaacactgagaacggaggcagtgctcagctgctgggagcctctctgaagaggcacagggaggctggttctgggaagcaggcaaaataaatggacatgtaaatgaaaaccagaaactggttccaatagcttttgccagaattaagaggtttcctttctttttttcttttccttttctttccttccctccatccctccctccctccctcctccatccctccctccctcccgcctttctttctcttccttccttcctttctttcttttcttttttttttttcagggcctcactctgtcacctaggcaggagttcagtgatgtgatcaccacggctccctgtagcctcgacctcccaggctcaagtgatcctcccacctcagcctcccaagaagctgggaccacaggtgtgtgcctcaccatatctggctaatttttgtattttttggttgagacggggtttcaccatgttgcccaggctggtcttgagctcctggcctcaagtgatccgcccacttcagcctcccaaagtgctgggattacaggcatgagcccccgtgcctggccagcattaggaggtcttaatggggacagtgacaggaatatgaggcagagctgggggatcagcacctgctccttcccccgggctgcctgtctctctggcaccctctattcacagggtgcatggggcagtggacatggaacatggacgaggctcccagcccatctgctcccccaggccatgtgtagagggtgggtttggagctgagagaggacagctatgtagtcaacacactgtctgatcccaaattcatgttcctggattctgcctcaccctcgcctctgttgggggttgagaacctgccccaagtcaggtcctactgcgttttcatgatggctccaaagagtctcccttgagtgctggaattgcacggggcccagcaccgttggctgcaagactgtctagtagcctgcacttccaagtctcgctgccttctgggtgtggccaaagccctgttgctgcctctgggatccctgctcctccccatcccctgccagctcactctccagcctgacccaccgcgtttgctcttggtttatcagctcatgcctgtgatgcttcatcccagtgggtgaaagacaagattctggctgctccctgcctcaccccctcctcattcctcactggtgattcctaccgaggtccagggtaggccagggcctatggggagacctactatggtttgagggtagccaccctcctgcaggtgtgatagcaaggaggaacccacgtggggcccgggaagtcctatggaggagttgccaggggcaaccactgtgggttgagggttgctcctccctcttgcaggttcagaactgcagcctttccagggcatccagagatgagggcactcaggagaagggccttgcaggcatgagcctcacagaggtgcaaatggcagtgccaacacattgaataggatgtggagaatgtacacttccagtcacaggaaagctcaggtgctgcgttcagggtgcccttccctatgtaaaggtaatagggagtggaaaatcacactcatccttcaccggtccgtgcggccttgcccttttcggcagcctggtgagaggtccatgtggtgaggctgtaagccctgcaacacgcgcatgagtgaatttgggagtgattccccaacgtcatccttcggatgagaccacagccctgcctgacagctggatgtagcctcatgaagaactgctgagctgcagccacacttctgcccccacagcaatggtgagacagtaaatgcctcttttgttttttaatgccagtaagtttgggggtaatttgttatgtactaaaggtagttagtacacctcgtaaaaaattgaaacatactatttcattctgagtaacatgactgccacactttgaagtgattagtcttcaatgagtatccctcctaaaacataagtgtgatcttaattttagacatcaagattatccaggtaaagtgggcttttgcataacattcaagaatatgaccctcacctctcagggcctttgtattcacaattttgattctcatatttgaaacgcaacaattgatagttcctacagatgatgggagtttctctactcttaaggctaccctcaaatgtcagctaaaattccactaagtgtccaacacgttatttatttatttatttttagacagggtctcactctgtcgcccaggctggagtgcaatggcatgaggtcagctgactgcaacctccacctcccaggttcaagtggttctcgtggctcagcctcctgagcagctgggattacagcctcgtgccaccacgctcagctaattttttgtagagacaggttttcgccccattggccaggttggtcttaaactcctgtcctgaagtgatccacccgtctctacctcccaaagtgttagaattctaggcatgagtcaccatgcctggccccaacatgttatttaaatgcaatgttccttttgcctgttttatgagagccatgcagagtaaatggtcatttttcagacaagtagaatgatacttctggaaaagttgaagatagtcattaaaattcaggctgagggaacaagaatctcattttgtcactagtcctggtctgttgtaattacagcaaagatggtgtgtctggtaacctctctattcagaattaaacaagacacgccaacctgtggctgcattgggtcgaaagcatttcctattaacacctgggactgctgggtctaaatagcaacaatctcaaggcagtcatattcactactcctggagcccccatggtgtactgacgctggtgacctgtatattggagggggagccgctccaccacacgactcttctcatgatcaaagtacagacactcagtttcaaccacaccagcccagccaagttattccagtaagaaaagactcaacacagcctcagatggcaaggtcagcaatctgacagcgagctgccgtgggtaatttgtcaacatccactttcttctctgtgctctgaaatctacacagcgcagggaaaaatgcaaagtcagggtgcagatatcaggctgagtctgaaaacctggtaacagggacaagcagaggctgcccagcacatgggagggaagggtggagctggacactggccagtgggctggccagagccgggatctcagagcatctcacaccagtaagtcagcagcctcagagatgcaaattgggtggggcagagctcaccgaggttcagattcgcaggaggacagcaggggattaggaaggtccattctcagttcagagggaggagtccaggggtctgacacctgtggccaaaccaggcgtgtctccacctagtcatgatttacgagttatagccaagtgcacgacctcagcatttcctgtgggtcccgctagttgctgctggattagaggttgtgtgtatattctaaagtctacttggaaaaaatgtacagacaccaaggaaaaccctgggttaaaatgttatcgggaggttaaagagacccagggcggatatgagggagggactgctccaggtatgtggggacggagaacactacggggaacaagtcccacgcacacactgagtgctgcatacctcctgcaccacaagcgatactcaaccagaagccgccaacattcagggaagagaaggaaagccggcagatactattcatctgctagattcacagcagataacaagcataaccagtcaacccacggatgctaattaaaaagatacttaactgatttcctgacctgtccccctcgagctccaactagcactgcagaatgtttccagtcatcgtctgggctctgtgggtgccatggaggcagagtacccatcgctttatttgcaggcagcaatttcaattggataccttcaattctttttcttggtttctagatttctgagtcttaccatccaaaatagtaagaaaaaaatgcttactcctctactgcgatactgtttacaaggtttattttctgagagaaaggaatgacattgtactggacagagggctgatctcagaggggggccggctcaccggatgagagcagttgaggatgccaccatcccctgtgtcccagggagcctgctgcttctgtgtgtagtggggacaggaaatccttgcctccttcacagatattgcctctccaaagggaaggaagccttccccttggctgaaagagaggcagttgccgtaagccttaagcctcggcagaaggaggctccgcactcttccgcgtccctggcttggagcgtgggtttgatgttggcgtgggcttgctgcagccagctgatgtgcagcagcctgacctgcaggctctgggtgggcccccgagccctctcccagccctccccagagctgcccttccctccccacttcctcccatctgctatactaggtgcacactcactgtaaagggagatgcagaacctcagtctcccgctgcctgtccctctggcctgtgtcacgtatgtgcctgtggatgaagggcaccttctctacactgtagcgctctgagccaccctcctccacgtgcacacagacccaggaaggcctcctctcaggaccaggggtgcaggctgcggctctagggatctctgtgctgtggagggtcttgggaagcactgatcctgggtgcagagcagtcttgtccccccagagctgtcattccaactgcagctgccataagggggtgcccaggaccaggctgcactgaggtctggctgcccagtcagtcaacaaggaccctggaggagaaatgactgagtcgctgtccctggggggctcctggtgccctgtcgacaactctgcacagccctacggactcccagctgcagagcacctggccctgagcccatggggccagctgctatttgatggatggagggtccacatggctcaggaggcacaaaacaggacaaaagtttgcaaactctaaaccaaacttgtccaaagcgcagcctgcaggcggcacgcagcccaggtcagctttgaatgtggcccaacacaaatttgtaaactttctaaaaatattatttcttttgtgatttttctttttttagctcatcagctattgttagtgtattttatgtgtggcccagagaacccaaagattgggcagccctgccaaactaagcttgccgtaagacatgccaaagcatccaaaatttccttaccatttgctgttaaaaatagctttgatttgttatccagacctactgtgccgttctaaagagttaccatcagataaatatacataaagagccatgaacattttctcctcagtgaaattctatggagctgttgctatcttcacaaagcgtgtcaacagccctgaagagagctgcatcgctggggaaagagagttcgggcaagattgttgattcttctttctgatcaagaaaattgtgtactggtactcttagagccctggagagtctgcaaacaggaaatgctgagttcctcatcaagacaatcttttatagccatccatgtcaataaatagattatttttaaaaaggaaagcaacataatgcattcaggaagttatttgtgggaacaggaaacctcttatttgaaagagttattgactttgattggggacagtagtgctttgaacatggcaggtgggcgctgggcagaggctgctgcctggctgagggggacacaggcatgttagaggcctgtggtgtccgttctgatggggaccacgctaaaccgtgggactgctgccctgggagcagggagaggcagctcaggggtggtctgtctgagcaacagcaggacacgcaacccagcaggcaccaaggacaagaggtcgatatctttagagggagaccgggtgaggaaagggcttgggaattaggaaatacaaaataggaaatcaaggaatgtgttcagaagctgtttatggaaataagaaaactcttacttcaaagatatgggacatgaaccagaaataagcatcatgatgatgaagacagtgttttgtttttgtttctgagatggagtctcactctgttgcccacaatggagtgcaatggtgcaatctgggcttgctgcaacctccgcctcccgggttcaagctattctcctgcctcagcctctcaagtagctgggattacaggcccctgccaccacgcccagctaatttttgtatttttagtagagatggggtttcaccatgttggccaggctggtctctaactcctgacctcaggtgatccacccacctgggcctcccaaagtgctgggattataggcatgagccactgtgcctggcgaaaagacaatgtttaaacttcatatttctacgaaatattctgccaccaacacagacacataaagagtgagctgcagtgcaccaaacgaatcaggtcctgtggttctcaggttcttctgttctccttgggttccagtgccatggccagggctttctgcatagggatcctctgcccagcttgccagcaagcggagggcactcacactggggacagggcccaagtcttctgcttaaaagaaaacaggacgaaagccaaagggaagagggtctctcccacatatcatcttcatgcctgggaggaggccggcctccccttcccagtggggaagcccctgcagttccagcccacctacccctgctccttcagtcccactttctctccctctcccccagcccaacctgccatctctcagccctggtcctgccccagtttccacgctgttaatcagctgcctttaaagatgttcgtggcacagtcgtacctgcaaaggtaaccaatcccacaagagcagagaggctgtgacacccggcaaggccctggaaaatcccctccccagccccagcgcgacgtgctcctgagatcagccctgctgggtggtcccctccacagccatggacaacatgcaggctccttccttctcggtgggttaagacataaggaactcaccaataggaaatatgaagatctagtaaagtttcctctcatttcaatcctattttgtgcctgtttccagttccactcactagaattcctcaacactgtcccaatatttgtttttgtgttttagcactcctattttaaatcgggaggaatgctttcacttttccagttattccttatttgtttcatcctgtttgttttttggctattgtgtcatatcttcacagtctctctaggtttttaaaggtctctgttccctgagttctatatgctgcttctgaggtcaccatttgtttgcttttctctgggcaggtaaggaagctgtcaatcgtcataacagaaagttgagtgtaaacaggcttcgccgtaagggattcactggctcgccaatgaaaagtcctgggaggccgggtgcggtggctcatacctgtcatcccagcactttgggaggccgaggggggatggatcacttgaggtcaggcgttggagaccagcctggccaacatgatgaaaccttgtctctaccaaaaacacaaaaattagctggccgtggtggcatacacctgtaatcccagctactcaggaggctgaggcaggagaatcacttgaaaccaggaggcggaggttgcagtgaaccaagatcatgccactgcactccagcctatgcaacagacttaagactctgtctcaaaaaaaaaaaaaaaaaatgtcctgggaggtgcagcctgcacaactgccttatccacttctcttctcctgaagggctggccctgccccaggccggtctcccctagaaagtgtggccggttgatctccggaagcgcaagtccaccctgtgattccacgcctcaccctctagcggctcggctccctattacacgggaagattcctcttgatttgaagtcagccatgatcagatctcacctaatctccatgtagaacttgtaaccaggaccgttccaggcacacacttcagactgtcccctcctggaggtgtccctgtgctgagccctcccgtgaggccgggcatcagataataagacttttccccttgaaactccacagccatctgcttcatgtttccacagcacttaccacactctgctgcgaacactgctcccaacgtctacatattcacgctcaaccagatttaaacttccttcaatctacatgtttgtatgtatcctacaataccaaacacaatttactacacttcaaagaggctcatgattatgaattgaattttttctcttgtccttcttgttttgactgattagttattggagaaactggaactgagaaaggatttctttaatggtccagcacataggagtagtgtgtcgtgatgttctcttgagaaagcctgggcttctcttcaacggagttttagttaacttggagaaatcttctgtttccagtatgctcaattctaccaaatttaggtgaatttatatatagttgttttgcgtattttgaaaatttataaccttcaagggctaccaggtgtcttcacaacagaaagcttgaggtagtactaggatggaaggtcagaggttgacaccttccagaaagacggaacggaaggacatgggcatcaagccaaggttaggttttatacctaagaggcagaaccgcctgattctgagaaatagagatataaaatagtagaagatactatacaatacaaataccttctactgtgtagttaaaaataagaaacgtgttcatatcagtttttttttttttttttgagacagggtctcactttgtcacccaggctgaagtgtagtggcatgatgtcggctcactgcaacctcctcctccaggctcaagcaaccctcttgcctcagccttccgagtagctgggactacaggcatgcaccaccactcccagctaatttttgtatttttagtagagacaaggccaggctggtctcaaattcctggcctcaagtgatctgcctgcctgggcttcccaaagtgctgggattacaggcatgtatttaccaacctgagtaggtattaatgctattccatctttatccttgaaaaggggaaggaagatatttttggattattctaaaattaaaagtaaattatatgatgcctaggacttgccacaaaataacctggagctgtgtgggtaggtggagaaggagagggagtggacacataaataaaacaagactggcctggtctggtaattttggaaattatctgagacagatctgtggggatttattacattctttgcttccacatgtgcttgcattttttatgataaaactcatcttttttaaagcaggggtttaacctctcaagcaaatgagtgtgactgtcacttttaaaatgcttctgatattaaaatcactcccagaacagcataaaataagtcatttttaaagctggtgtgggatgtagctgtgatcctgggaaaatataaagctggtttccggtatggatccacacctgtgctgtgttcataccaacagcccggctcaagaacatatgccagccgtcaagttgtgcaaccagcaccaatttctcctgccagccagagcctccttaccttcccaccttatttccggccacttcccagcacccattcttactccaggtgggtctaaatcctctctgctcctcacgaggctcttccacgcttatcctggctcagaacatctctcatccccctgactgggcctccaccctccacggggaaccaaatcatgggaaagctggattccacaagccgccctgcaagcccactgaccgcagaaggttgccttctacaacagcttagctcaaaaccttcttttcgctaaataaagttgtattttacttccatgcaaaataaacaaaaactcagtttcctgccttcaatccttctctcttttatttcacagaaggaactttggttctcttaaataaggcttccactctgcatgtctttcccaacagataagatcgtttacgtctacttacagttctcaatgtttgctgttctgcgtcaccctcagagttacagatgactgtgactcacgcctggagaagcagcaaggtggggtgagaaaggccaggtggtgacctttgtccaaccatggctggcaagcgacaaagaaagggggctcaaaacgtggcctctgaagtctcgatcccccgcatttctgctgcgccttgagccccctgtgcttcatggggctgggctctcaaccgcaaagcaggtattttttgaccacagatgaatttctaaaatttggcaaaaggatttaaaaactctagaaatagtgtgtatttagatatctgttccccagataaatttgagtatgactttttttgatcatggtcattagtagataaaaccgtatttgtttacaagtaatattaattctataggatttagttcacgttacaaaacctggttgaccaattaccagcactaacagaactaaatagtaagtttggagaaagaaactgtgaacagaaaggctattcagtaggagatgttgctttttaagtcacaacaaaaaaataataaatattgtcaccgggcgtggtggctcatgcctataatcccagcactttgggagactgaggcgggtggatcacctgaggtcaggagttcgagaccagcctggccaagatggcaaaaccccaactctctttaaaaaaaaaaaaaatacaaaaattagccaggcatggtggcgggtgcctgtaatcacagctattcaggaggctgaggcagaagaatcacttgaacctgggaggtggaggtttcagtgagctgagatcacaccactgcactccagcctgggcaacagagtgagactccatctcaataataataataataataaataaatattgtcacttatttttgccagtgcaaatctagaaaacatgagatgaaggataatgtgtaggacatagccaaaaagagcttgaacgtgaaagtgagaggtaacaacgtgctagcagccctggctcgctctcggcacctcctcaacctggcggcgctcctcgatctggccgcgctcgaggagcccttcagcccgctgctgtgctgtgggggcccatctctggggctggccgaggccggagccggctctctctgctggtggggaggtgtggagggagcggcgcgggcgggagctggggttgcgagtggtgctcactggctggcgcgggttccaggtgagcgcggctcggcaagccccgcactcagcgcggttggccagcgcctgctgggcttgatgggggacgagctccctctgggctgcaggagtacctggactaggtgccgcaaagtccctcggcagtgccagtgagaggtgaagccagctgggcttctgggatgggtggggacttggagaatttttctgtctagctaaaggattgtaaacccaccagtcagcactctgtgtctagctaaaggtttgtaaacgcaccaatcagcactctgtgtctagctaacggtttgtaaacgtgccaatcagcacttgtttagctaaaggtatgtaaacgcaccaatcagcactctgtgtctagctaatctggtggggacttggagaacttttgtgtctaactaaaggattgtaaacacaccaatcagcactctgtgtctagctaaaggttcgtaaacacaccaatcagcactctgtcaaaactgaccaatcagctctctgtaaaacggaccaatcagctctgtaaaatggaccaatcagctctctgtaaaatggaccaatcagcaggatgtgggtggggccagataagggaataaaagcaggccgccccagccaggagacctacctgctctggtccccttccacgttgtggaaggtttgtttttttgctctttgtagtaaatcttgctggtgcccactttttgggtctgtgccgcttttgtgaactgtaacatctccacgaaggtttgcagcttcactcctgaagccagtgacagcacgagcccgccaggagggacgaacaactctggacgtgccaaccttatgaactgtaacactcactgtgaaggtttgcagcttcattcctaaagtcagcgagaccatgaacccaccagaaggaaaaaattctggacatatctgaacatctgaaggaacaagctccagacataccatctttaagaactgtaacactcatcactagggtctgtggcttcattcttgaagtcagggagaccgagaacccaccaattctggacacaaaaggagacttgctgaggccagaggcacagttcaaacttcagtcagatgcagaatcggaaaagtttcagccttgctgcccctctcctcccatttttgactctggaaaggcctgtgagggacctgtttggcgtatcgagtgaggactgctcttttttaacagcagccgcttgtctctcccatatcttctcaccccttctgctctgaatcaggctttgttccctagtgaagcacagaaagcagggaaaattggagaaggtggaaagggcagagaggcagcgccagagcacagatctagccacaacgtgtccaccccactgcgtttagaaaatgcaaggaaggatgtaccaaaactgcaggttacaacactgtatcttagaaattttctgagcttaagaaatagatgccataccccacgacaaaaagaagtgggttgcacaatggacttgtaccatttcctgatacaaatgatgcttatttcccaagaaaaatacgaggcatagccaatggcctaggatgcaaaattataaaccaactcattgctccactggaaaccacgcccttcttctagattccgtcttgacataaggtccaagtttcttatctgcaccctccacacggcatctcctacccctaattcctctctgacacctgcagccacggctgaccagtgtgaccagtgctgatcggtggccccaggaaggctgagctctctccctgcaagttgcaccaggattctgtgccccgaagggaaaactgttcctggtgattcccgtgtcccagttccttccttttgtgattccagctcacaggaccaggcctctccctggatctccccctgcccgcccccccccccgcccccgcccaagatcttgctcttggtggcctgtctcccagagatgaaaagtcctgtcttgacccttgtttgacccttgtggcccagggctggggcctgacacctgcagcaggtgcctagaatgttaatgccaccaacttttcctgtcctctgctgggaatgccttgtccaccagcagctcctgccgagatcccttgatcggctccttctgtgagtctcgacaccacccaccaccgcactgttctcccgcagagatgacagacagcttaggtttaagtcttctgatgcccagcaagaatatacaaagaaaactggcctaaccaatgtattaatagtaaaatctggttcattcgtaagtagagttctgagggttttgagatgctgctgttatgtttaagctacaggcaatttacccaaggaatgtgatgttgaaatatgtttcagaataaacttccgcttgaaaattacaggcaataaaatgtaccagctttctccttttcttcttcattaatgaattgaggaacataaaagctcaattaaaaataaagactcatgcgtcacttagttgtttttagtcctttcaatttaataaaacattggtattgaggtgtcgtaggaaaatggaaagtcactgctccgtgtctggctcagtatccacgtttggcttacatcataaatccagagccatggggagtgtcttttccctacttcatcggagcctagaatgcccacaggtggggtccggtgtgggcagcacaggggaagcatagagagggtgagacagccctggggaaaggcaggggcagggagcaagctccgagggcagggccaacatgtcaggtttactgctgaactccagggtctagaacagagtgagagggaggagggactccataattagctgtcgaataagtggaatcccaagaagaaaactgggtgggagtgtggagataaacactagcaacaacgacacaaagaaagcaaggattgcttcatagccgggacaagctcattcatcggaaaccatgaaatggaacctgtctccccacacccagcaaaataacagccctactgcctgtcctcagagcgccctatgaccaccacctacctcagtaaagagacaacccatgcatttgaccacatcctaagccctttttccccttctctgtttcttctcaaaggccaggtgatcatgtgggttccagctttataaccacattccttagacccaaaccaatgagttgaaggcatgaatgaagtaggtaagtgaaggcatgaatgaagaaatgcaacgagaaactaggggaaggcctaccagctgatggacgtcagatgggtctcgccgcttgccctcggtgaagcccagcctgagaccacagctggcagctgtgcttctgtgggagaagatccaagcgctgctcaggggtcacaacatgcaacatgactctttctacagggcaggggcaagcccttaaccatggaaacacatgcatttccacgacaactcatacctacgtgtgcctctgtgttggagagtattgcatattgcagatgtccaaaagtgcacaaagttttaactttatcaattacatgaagtgatgctctcctaactcagagttacattttggcaagagccagaaatgtaccaatgtatttccaagcaagcagtgagtaaacaggaagcaaagtgtttgctccccatgatcaattataatctacagaccacattccttccactctagagacctagaaatatgtttttaaagtatctcattagtttaaattatgattttaaattactttattagttacttgtgtggccatttaaataagtcagattttactgggaataaatcaatgattcatctaaggacaatgtgtgactcaaatatttccttccattaatcagtaaatgttccttttcccaacgtgcttccccgccaaggaaatcaatgtctctggataactaggtaggcgcaaatatgtcagagcacatcagactgagaacacagaagggaaacacatctggagcttttcgcatccagggcctcactccaccgctgatacgctggtagctgaatctcgtccgaccacatggtgggtgaggctgggacagcctggagatacaggagagagcagctagcgagaggtccttggggtgttcggcagctgtggtccctaaggttccagcccccaggcaggcctacaacagccacggcacctccccttcccttctcaggacccagagctcaccaggcagcagcaaggggctaccgtgcaggagttcatcttggaccctatcccagacacgctcttgtaggaacccaagataactggaggagtctataaggaggtgttgtcatctagatgtagctggggacagagatcagaaaacagggcccaacctccccagtgaggtaggagacgggacttgactctggaggcagggttcagatactggaccaaactgagaccctgctaacacagggacggaggtcaggggatgtacccatcagtgtgccatgtctgtttactattgccatggcaacccccaggcattaccgccccttttcatagcaatgaccccacaacccaaaagttactgcccttttcctagaaatttctgcataaactgccccttaatctacatgtaatttaaagtgcgtataaatatgactgcaggcctgccctgagctgctactttctgcctagcaggtaactctgctctgcaggagcagtcacagagctgtaacactgctgcttcaacacagctgttttcttccaccctaccgtctgcttgctcttgaattctctcctgggtgaagccaagaccctttgaaggctaagccccaatttgaggctcacctgtcctgcatcaccaggaagaccagagaccaaaggtggggtctcaccgggtgcagtcatcctcaagccttcaccctgctctctgccctcctctgctctgccccagaggccccaggaatccggcagatgccgttggatgtatccacagtgcagctccatccccgaaagcctcacctccagcctacatcgcttttacctcccaacttgaacatttatcacccttccccctgaacaacttgatttgttttctaagaaaaattctgaacctactttttaataattaaatgccctttctccttctttccaatttataataagagaatgtcttacaaatctgaaaagcaacaagaaacattgtgccagaggaggagctaaaagaggctatccttacttgagagagcgtggtactgggagccacactgcagggaggcccttgcaggaagagggagatgtcactgcgggatggtagctccagagccctgcaagggccaaccggcttccatggaagcaccccaacctcgaagtccccatccagtgggcggagctcagcactacaaggaagctcagacatgaccctgatggagtatgggtgggtgtgcaggctgcggggacagaggccgaggaaagctcaggcaggaccctgatggagtgtggagtgtgtatgcaggctgggaggacagaggccgaggaaagctcaggcaggaccctgatggagtgtggggtgtgtgtgcaggctggaaggacagaggccgaggaaagctcaggcaggaccctgatggagtgtggggtgtgtgtgcaggctgggaggacagaggctgagaagggcaatggttaaaatgatctgttggccatttctatcactgtccatcccacttgtcctccctcagacactcgggacaagagtccaaggatcccagacctctgactttctttctgccctagtttcatggaggtgaactgatggattcatagccatgcatctttgagagttgttggagtacagtttcattccctaggattagggaagatcttggattcaaatccatagactcttcctgagctcccactgcatcccagcttttgaaagaattcctccccgtgcaccaccactcttcaccctcacgacaattctatgggcatcacgtttcttatggcaaagagccttgtaggactgaggttcaagctgggttcacacagccaggtacttggtgccctttctcccaccacatctcctaccacctccttgctgccttgctccccggctaagctgggtctgtgcctctatctccatggtatctacatcactgcttttaactcctaccatcgagtgatcccgcagacaatgcaccatggtgatggacgatgggcccatgccctaggagggagggggacagagggcgaacgaaggggctgagacgaaggagctgtgaggtctttacattcacagcctcaggtcttagggctaatgagaacgaatgactgggataagccaggtgcctttccagacacctacggaaggatcgagaatcttatttggcagtgacaccagttctaccccacagagatgggaagagatcaggacagcattgacctaagggccatcctatgctcatgtaaggtcggtcctgctgagtcctgccgccaggaacaggagtcagggtgcatatcgggcaccaggcatgaggatttgtcactgggaacaaggatgtgtggagaccgtgcaaagcaacccgacctctcctactgtgggaccctctggcccagggttatctccatgtcacctggtgggctcctgagcaacttttctgcttttttgtatgcagggaggtgaaatgacccagaacaagccctgaaatccaagcaggttggtgtgaacttctgaaacctctgatgccaaaccagcacctcccagatactctggagccagcacacatgctctgcacccaaggccatgtggcttctgctgacaggccccagcccatcagtgcatctgatcctgcagcccatgtggcttagctttccttctctctctgccccgaattctccacccctcactggctcacttctgctcatgcttcagcctcctggcttcctctgggaagctgccttgctccccggctgagctgggtccatgcctgtatctccatggtacctatgtcactgcttttaactgtgctatgttttgaggacctgttcaggagctgtttcctgcaccaagccgagagcactcacagcagcacccatggtaggagctctgtgcatacctggtggattaacatgtgccaattacagtgtggccacaaatccaggacagcaccaccacttccttcacccgaggtttgaaggagaaagaacaggggtgaggggagaataggatcgagtacaagtccggagggactgactgggtgcagggcagagggcagctctgtctgcgcccattctccatgctattgagatagccatatgaagacacaagccaaccaaggcatctgccctgccttcacggacacctgcgactctgcctgggccgtggagatccagacacagacagcaatgccccagcaactgcctccacggtctctgtggggagtagcagcattgtgatcattgcaacagcagccaccgcgggcagagttcctcctgcgtgccaggagccatggcaggtgcgatacctgcctcgcttcgttgaccctgacaaggtcacagggcaggggatcattagacccaaatttcaaatgaggaacacacagctgtagtctgcactggacacgcacatgccttgatagcacaaggcaccattactgagtgtccatggtgctgtgtatatattcactattgaaagaacaacagtggcacctccctgcctgtgagcgtggccttgttgctgttctagtgggggcagggggacaccagtagaggccagcggggtttttcacccagaagctaaagaaaaggaagaggtggtttggagggaaaattgttgactgaagaattcaactattgggagccagctgactccactctatttatttttctattaagatggtttactgaattatttgaattgcaggaatccagtcattttaatttgctcagatgtggcttattgaactttgattttctgtgctgaagagcaaacagaacgttcaaacaaatttaagttgggcacgtttaaatgaagcgcagcattgcgtcggcggctctgtgtggagcgttatcaggatttgctcaatgcgtgtgcacagagatgcaaaattgcctttaccagaatcaatcttgggttatgtgtggtccaaagaatgcttctaagccccctgcggtaggagtgagacctggaagatatgggcaatgagacaaaggcccccagaccaccactggggagggggttctattcacaggacgggggagcctgcttgggaaggagcagggacagagctgggctgctctgcatgacacagcgggacagggattggctgggaggagatggagtgagtattcaaaaggcaggaggagggagacagggccgcagacctcagggtgggaggggtatgtggggttgggaggccctgacgggtctctggaaggcgaaggagctggcagggcttccaggttcactgtggagcagctggggtgctcttttgtctgctctgcctgcctccgaggtctctgggtgtctccctggctcactaaagctcgtgtgtggtggatctttgagggggaacttgaaaaagacacaagctttgccactgggacactgcacagggcccccgccagggtcctcaacctcaatttcccactcgtgtcccacctgcccggccccctctgctcatccccggccttgccaggggcacatttttacctccagtgcagctgcagagggagctggccacgggtggctgggttcacaagtcaggaccaagtgattaagcagggccacgtgtgccccctagcaatgagcagaaccgtggggtaaaacaaaatcactgggtttggaggatgaaagggtaagaagcaggtggctaggagaggggcacacagtgtcaccatgaggaggtgacatgatccccaggtagggggcgggaaggcgagagcgacagcgtcagcgtgaggctggcaacagacagcgttgaaaccgcagttgtgcttaggggctaggacgtgcctaaggttagccaaacaacagaaaccccgcatgggggcagcctgggagccctctttccacaccttcatgtccacatgaacccatgtggggccatctcctgtctcagtttcctcatctgcaaaatgagatcgtaattgtgctcctaaaaaattacaaggactaagtgaattattacatgcaacaaagttagaatgccctcaccatgcacagcctgaatgcagagcaagagatttcagtggagtggaaagaaatccacccttgcttcagggctaactttaatagcatccccgaaaacaaaggaaactccctgagtacaaggggaacctcctgccgaaggccagccctgagcaggtcctccccactcgcccaggtgagcagggctctggccgccctgtgcctggaggctgcgccaaaagcgctcccctaccaaagccctcgctttctcagtgccgagcaccatgtttccatgtggatttacaccacttctttacccctgcagagaagactggtttcctgtcccaaaaacagaactcgtgtctgaattgacaccaagatgaactcaaggccaggagcccgggatgaaggtagcatcccaaggcactcctgcagcgttagcagaactctctgcacacaggcacctgccacggatatgtgtgcgtggcttcccaacgtgatacaaggaaaagagtagacatgaccacagtggaacaaacaataaatatttaattgaatgaaaaaataagtaaggatcccgaggaaagtgttggttaaactgagcatggccagttccgatttttagaacctccaggggatcctggaatctgcttctccccactggattcgtaggtgttgggctctgctggccctgtggtcagaggtgataccccccaggcaggccagggggacctagtgggacaggtgtgggagactgagtgcaggcatctcagacagctgtttgaagcctcgggcattttaataaatgtccccctatttcataggcaaaagtttggtgtccctgaacaaaaccatccaactgtagctgagtgaagacagcactggtggaagcagctctgtgcccatgagggttctgctctgcaaggctctgtgcacacaccgaggacaccaggaccagagaaagccacatgaaagttttaatattcggccctcaggccaagtggcaggaagcaaagctgaggcccacccacctcaccaggaggcctctggtcctgctgctgtggccaaggagtccacactgcgttccctccccaaggaggtggcagagctgcacggtcccgcaatcccaccgcatggctccggtctagggattgggtgaggggctctgggagccctggaggtggcctgtcaggggaaggaccaagctgaggggtggagggaggagggtgaagtgtgaggctgctttgggaccacatcacaacccaccagtctgacgtgagcacccagcattggggtgacggggtcttttctcccacagctttttcacataaatccactgctctgggaggggagtgtcaagctgtccttacatccagagtgagtccttgagggccaccactgagacctgttcattccacaccatcagggctaaactggtctattccttgacagagcatcctagccccagaggcaatacggaaatacagacatgtcagcacagaaaggcaacaggattcccatcaagtgtctatcacaagatcagacagtctgagccacctgcgtggctagaattatgtctcaaggtgccaaacagctttacacagttctcgggattcttcaaagggagaagaactccctctatgagctcgaagacacgcgtcggaactccaggcgtcctctgacacctcgatgcagctccgtgagccttggttttcctctctgtggatgaggacacatccgctccctgggggcaggaggggacgggggctcagctctgcaggtccacagtgagactccctgggttgcactcctcaaagtcccttccgctagataagcctcagtttcctcagctataaaacggacgtacaccatctacttagcaaacactgcccctgcactgtggcaagtcttagaattctcattttttctcaggggaaatctctgaccacggagaccctgaacaggcatgctgtggacaggtgtttacagggcttactctgtggcatgccatcttgattataatgttttataaaggacattaattacatgaaagcattaaataaataattaatgtgatcatcaacagtaaacagcataataatcaacagcacacagtccatataatatattcttgatggttttaaaccataacgaaaatagaaaatgaaaaactgtaggttctagaagattcaagcgttgccaactcatgccgggagacctgcgctctgtcataatgttgcttctccttttatacctgactctgccatctgattgccctgaaaattacggccccgggttctagcctccactaagagtgctgccaggacttgacctcaggagttccttggattctttccttctctgttttcacggcccgcatgccaggttaggccctcctcatcttatgactcactcatgctataacaaccttcaaaacgatttcctgcttttaatctctctccactccagtccagcctgagacctgccaggctattcccaaaataactcttctcgtgtgtcactccctgccccaggcgcccgacaccttccccgccaagctctctgttcccctgctcctggctctctctcctgcacacaagcgcatctcacctcccggttttcagggtactgtgctcagcccgggcctcccctgctgccctgttagaagccctcctccctcagagtccagggagctccgaccctctccgtgatgtgttcttaactttactccacattttgacacgacttacctgcaccccaccattagtaccatgcgtgccatgacatatgtgacattttctaaggcccctatctaaatatttcatcttcaaaaggagtggaggctcctttggtttgaggcaaaagcatgttacaaaagaacaatgctaactagattgcaggcatttatgtaattatctatttatccatcttctatacccttacacggggaaaggaaatgagaaattgaaatgccagcaaaagaaaacaaagaccagaatgagagctcaagaagcacgtgaggccgggaggaagccacacaggccacaggctcctgggcagctattccccgtgtcccaggagcagtcacccatcagctgaaatcctccctccctctggagttagttacaggtcagggcgtcctgtgttgggggaaagaactgcagattcacaagcgtgcattaaaattaaatgacatggaagaggaagaagcagagaagtggacgtgtgggttctccacctcccacaagtgtcccctgtcaagatttgttgtcttgggaagataaaataagggaagaacagaagagtaaaagggataaagtgaggcgatagagagaaaagaaaagtaaggaaagaagtagtcagaaaaaaataaaagaagcaaacagcgcttatcctcctacctctgctcaagctataaactaaaatcgccccctactgaatatatgcccaagaagaagatgctgtgagaaaagtgttctgtcgaacccagggaccagcgtgtgcagagatggacgatggaaacccagccatggcaaactcaaggacaagacagaataacactggacagagagcagacgctctgctgagcaggaaacttttgcaagccaaagtttaaagatacataggaacaaagtagaataaagtagaataaacaaggacagaaaacatgagaaaattggatgctaaaaaaacctactctaagctgcatattaagtaaaatattaagaaataaggaaaaaaaagttacaaatgtcatccgttattatgccaaataataactaactggcctgtttggcttccagagcggatcaggaaccatcttaaaaacaaaaccaaacaacacggcaggctccaaagtgctttttaacaaggtaaacaagggtacttactaacaatatcccatagaacttagagaaggcttggcggaggagagagagcatgtcgcctaagttagaaatgatgacgattttggccagggagccacactgtctttctcttcaagcatggagcatctcactcctccacatttcagagagcaaacctccacgggagtatgtaaacattcaggctaattgtcactcgggatcatccgaaactcaggagagggcaagaggcagttgattgcagcaaggatatgacaatgtcacttttagtaactgactcagtccaacacctcagagtcaagtgcttaatatagggctactctttccgttgggtggcaagtttagcgaaattgaccacctgttcccttgcaagtctgcctgtctccagcctaaatcagaaggagcacctggcaccgcagctcgcaggaggtgctgcagcgattggattttgcctcctatcactgcctgtgaaatccagatgttctgggaccttctccactcctgagaaggctgcagatcaagctgctaaacacgcggaagtgattcttgttgtttttaatatccttagttatgtgtcttttctggagattctatttttgtaagtttaaaactctggtttccttgcacatcagcagggcctctactaaagaaatggaaaaaaggagcgtctcagccgtgcactcagggtcctgcgcctccatcgcaaagccccaggaggactccctgttccatatttgtggactgctccaagtccacttagccaggatctctcgcctggtctgtggccagggagatcgagggtacactcaatttgttcataaaatgtctccagcagttttttagaaagtctgcaccattaatatccccctcccccgcaatttaacatgatgtcgtttgcatccttgtgaatacagtgtgccaccaatttgaaactctagccgtgtccactaggtttttgtcctgggctttcccaaacaacagcttaattggagtcagcaatttgagggagaaaggccacaaaaataaaagtaactcataaaaaacaagttccactcaccaagcttagacacaccccttaggcacaggttactcctgtggtttgctggtgaaggccagaacctcacctcttccttagacatccctctgtcccctacctcaaagaaattcctttctcccttaacgatagttctcgccattctgttaaatgacaaaattgatagaatgtctctattgtgcattgtgtgacattgcagctcatcaggaatttatgagtcatttttgacaagacgatggcgaacctctttatgactggggctcgctgcccttatatctccaaagggctggatggcccacatgctctctgcctcccacacacggaggttctttgccatgtggatacccagagacttgagaaggaatttcacttggcagatcacttgaccaacacaggaaccggctgctttatttcctgttgaagcactcacctgggccacagaggagcgggagttggacggcctggctggcacttctcctcctttaggtgaacttgctgggaacatcccatattgtttagaagactctgtagtctctttctgttcacccatctctccattcacggtcttccaatacaataaagtcactactccagtgattcttgattccttaactaaattgtggagagatttctagtaacgtccaggataaaaaaatgtctgaaactgcgaagaacaaagcctggcccagaagagttcgtctaacactttttgaggctctgaccacctggtaactgggcaggggcactgcattccaaagtcgcaattgcaggatccaggaagctgatgcgaacctctccctacatggtgagaaccctttaccttcccgtagctttaaatatcactcgcattctgctagagtgattctgtgcctctagtcgaatctactgttgttggtgggaaacataccacaaagcataattatctgaatgacctgagcccttactgcatctttccacgttgagagagaaagagagtaattcattcatttaagaaatattgattgagcatgcttgccgtttcatcatctaatgtatttaccattcctcccagctgggttttagataccaatgtgatccatatgctatttgcttacataagtctgcttgtaatatccatttattcaataaatagatattaatcacttaggctatgggatcagctctggaaacacagtggtgaggaagagagatgctatcctggccaccaaggagctaatattccggtggagaaaatgtcactaagcaaataacgacatagacaaatctatgaatacagttgatatggctgctgtgcagtgagttgctatgcgaatggactcaggaagacttgaacccaggttggagagacaggaacatcctctctgagaaaaggtcactaactctgaaactcaaaaggtgggtccagattctctaggcaaagagaagtgtgcagagcagcccgcttgaagaatacccaatggcaaaacaaacacaacacaaacagaacaacccccaggagcaaacccggagccagagaaaagcgcagtgtcattgaggagacccacagagacgtacatggccagaactggccagaaaatggggtaagctcttgttaacatgtttaggttttatcctaagtgcagtgagggtcttgcagggttttaattagaagaatgtatttttctgattatgtctgttagactgggttcccaatcctcaggcctcagactggtacaggtccatggcttgtaggaaccaggccgcacagcaggaggtgagtagcaggcaagcgagtgttacctctctagcctgagctctgcctcctgtcagatcagcaacagaactagattctcctaggagcactggattctcctaggagcactggattctcctaggagcactggattctcacaggagcactggattctcacaggagcactggattctcataggagcactggattctcacaggagcactggattctcataggagcactggattctcacaggagcactggattctcacaggagcactggattctcataggagcactaaattctcataggagcactagattctcacaggagcactagattctcataggagctggaaccctactgtgaactgcgcatgcgggaatccaggttgcacactccttatgagaatccaatggctgatgatctgaggtggaacagcttcatccccaaacattttccctccctgcactcccccctcttccacggaaacattgtcttccacgaaaccggtccctgatgtcaaaaaggttggggacggccgttttaggctgcacagcaactgactctgatatggggaagagccggagtgggattagcagctctccaggaaacagcaggatgtctcctgcacttaggctgtggggagaagcagccccacgtgagatctgggtggtagtctatcagctgggtgcggactgaatcaatacgggggtgatcagaaatgagagatgggagatgctcatcggaaacctgaataggtagatggaaatgcatcatttgtattcagatgatttctccaagtttatctctatcctggacttaccttctgagcttcagactaatatctccactctctggtagaaacctttattctaatattccccaggaaactcagtgaacatatccacagctcaaatcattgcccctgaaccatccattaaaacagttcctcccccatttttccttaaccgagcaaatgtttatcagctgaaacggtccattttctacgtcaacttgacagggctgcacggtgcccagatactggtcagggttattatgaatgtgtccgtgagggtattctgggaggagacgaacatttaaattggtgaatggagtcaagcagatgccctctccaatgtgggtgggtctcacccaatcagtgaaaggacagaacagaaaagccaactcccccacaagtgagagggaccccttcccgcctggccaccttgagctggggcagcaatctttttctgcctttggactcaacctgaaacaccagctcttcctgggttttgagccttccagctctcaaactataccattggctctcctggttttcaggcttttggactcagactagaacttacaccatgggcccttctgggacttcagcctgccaactgcacagatctttggacttgtctgcctccatagttgtacgaaccaattccttacaataaaatctgtgtgtgtatatatatgtgtgtgtgtgtgtgtgtgtgtatttgtatgtgtgtatatgtgtgtgtgtatggatacaaatatagatatagatacatatcctatcggttttgtttctctggtgaaccctaatacaccagctacagaggaaataatattgtctagggagaaggtaaagttaaaaaaaagactcatataagctataggatatccccacattgtaaataaaccatagtgcaacccaagaaatagaaatgaaagcggaagttgaccacaaatcaagtaggctggaactgtggcagaatgtcccctgggcatgcagccacctggctggagatggagactacatttcccagctccattctgtcaagtgtagccatggggctaggttcagatcaatggtatatgagggaatcgatgaactcccaaggaatctccataaagatgaagccactgtcgtagacttcttccttttctgttttctgaaggctgaatatccaatttgaaactgacccagtttaaactctgcaaacaagaaccacaccctaaaagatggtagagcgagaagatggagggaaccttggttgctggatgacctggtggagcagagcttccacaccagcctggactgttcagctgtgggccggatcccagaagggaggctaatatctctcctatttaagtcccaacattctgaaatctctttgctacagggtttgtttggcttgtactgaactgaaacagacatggaaacacacacacccgactaagcaacatggatggatggccgttccctcgactggaacagaaggcatgtctgcctgctctgctcacttctgtagccccagaaaatgaggcaggatctggcacggggaggactcggcggctgtatgtggaatgaatggatattggaagaaatacagactggcagtagaaggatggtgaagaagtggggaaagagtcgatagttaaatctctttacaaggatttgctgtgcagagaagagagtgactgtaaggactggggtccggctgggattcctgtctgtgccgtgcaatgggcatgtgtgtacatgggtgacataggaaatgctggggcatatttccacaaaaatataaaaaatccgacaagagaaaggactgcgacacaaaatagagtgtcataaatttcctggtatgtgtagcaggtgaagtactttcttcatatcaccagaagggaagaagaggatgggtcggtatacagcaaaatctgttgggtcacaggcaggaattttaggatgtatctgagtgatgactcttaaaaaacttctgtctggtgggaagcaaggtcaacctctggagagaatgctggccagtggaagtcaggctgaggtcaatggagaaggttgaaaacagtcattgtggagtgagagcaaagtgagtatagggctatggtcagaataaagggaagttctcaaaggctgatgaggttgggtaccatgcatttttatagtaaccatctgcccagtgtgtgtctttcccagcaactgtcaggtattagacagacatggagaacaggaaacactcgacttcttctggggctgtgattttccccaatgatcaaaattaaaaggctgaagggcaacttccgttgaatattgcaatagagtagttactgcctctctgttggagagggaagaagctgctggcaggaagggctggtggatgaggtggcgaactcgtcagcggacgggaggttctgataggacaggcatctgcactgtggctttttaaccagcctggttggaggacggaaaatggaggcaagagaatgtgctcaatgattttgtcaattagaagtgattaagtttccaggatgacaaagtttagaatgacggctaatttggagtagagataaacatcactggagatgaggaggcgaggaacgaagaggtcaggtggtcagatgtgtttttcaggaggatgtggaagatgccgagtagatagcaggcatggtagtgatgaggaagactggcatggattccagcgacccctatgagtgcaccgtagtaacacaggtggagtagatgacaactaagaggagaggagaggcggcatcatcaggttgcatgagatttaaagaagcaaatgtttgtccagctaatagaaaggctgtggtcagaaaactacctgaagaggaaggatgacctggcactcaggtctcaggggcaaagagagagcaaattgcttccacttgagaggatcacaaaggaagtgggttctcaggagccatcagatcctagttaaggaaagcaagaagaatcttgagagaagagtcaaaggtaaaagggcatttttttggataaaactacaaaaaaaacttgctttctgagaacattaaggaaaacactttaaatcattttcaaaatgtctaattgatatgatcttcagaaaaacattatctagtctgtatagaaattcatcttgaaataagaatgaggcagagtgatctttttaaagggtgatatatacaagtctttagatcagtgtaacatgactgtgatcatcttaccaacaaaactcaaaatcaattcagagagcagcatggccttggagaccacccacacccaacacaattgtacatactgggctttgctgtcaagttaaggagtgagcaaatgagttcggtatcaaaggtcatatgttttcacagtcattcgaattatatcccaaaaacttgtcttgtattctctatcttttgacttttttttccaaagaactgattgcacagtatacagaaatcctgctatattttactactttaggtggagtctaattttttgtttttaatttatcagtgcttaaaaatcttcaaaatagcttagtgaggctcatgacagtgctggccacatggaaatgtagccttttgttgcctttaaacactgtcacaccatctatgactgtcccattggtctgaagtgtactggcaaactaagcatcctgtaagacaagctaaagcttgctttttgccaatcagttgaaagtcctgcatctcttcattgatgcactttctttaggtattgatagtcaaaagcacaaagcatttattatgcattcaatcatgtagctaaacaaaaaactgcagtctcctgaagccatttaaaccagccgttccaaaatcttctgccaccactttgttagtaccatcagaaactttctcaactataaatgaaagaataaatggtagtgctgctctccagatataaggcactgctctgtatctttgaacatttgatttttttaactcataactgtgtcaaaagcctcaaaaaaccctgaaattaattttccagctttactgtcaccagccagaagtaaaattcttaatttgcctattagctgttgctgttaaattttaaatttattttttaaaaaacggttggacttctatcattataaagtatataaaattttcaaaaaaaaaagaacaattttgcttttcattgtattactgaatacccgaggtagttgagtaaaaatgcacgttttatacccctgtcaacaccgttcagcacttcccttaggttactcatgttagtgttaagtaaaaataaaactgagaacagtttttccatgctaatggcttaacatttaagttcctgtaataattattctgctccaattttaacaattggatttaggaacaatctatttgatgaatttagtgaaagcatcattaagccaatttctggcattatgggggaatattaagaataattagaatatctgttatactgtgagactacaacaaagggaagtgcagagctcttctctttcccccctctgccaccctttttttgtgtgtttgttttaaagctgggtgtcatacatttcagagagcataaagtacacattctcacagagacaggagttcaaaagttgcctggtcctcagaaacaagtggctaggtaaaaacttgtgcatgtgattctggatagggggtcagcgcctgtctgtttgttaagcaatctgtctttggtttggcatctgcctccgtggtgggctgtttcctgagccttacttccgtcttgactgaggtggtccactttgcagagccttctgttgttgctgctgctttacctgagtcagaatttcctgaatttttctctgggcaacctggcaagcatagaagtgaccagttattttgacaaccacttggtcattctcatcaggtgtctggtcacaagggacaacaacttctgcacttgacaaattctgaagttcattcaccgttttgcctccttttccagtaactgccagcagcaaaggatggcactctgatatgagcttcaagtttcacctcttctttaggactaacgaagttttcttctttcatttttccataattcttccctgagccttgaaccgagcctctggtgatccagcgatcatcaccatcctcaccttagcatctggtgcttccactggagcaatcttacttgaagctccagcaaagcgagaaagctgcttgatgtgctggccctgcttgctgatgagggctctgactgatagagccgggataaacagatgaacagtctcggattctgattgctcagactgcggggagggaggagtcatggctgaagggggccctgaggtgggaggtggcatccctgaagtgggtgggaacagacccaaggcgttcagatttaatccaggaattaaatgtgcttgaaatcatagaagtgatatcattttcctaacgctccctgattttcttcatgatctcttcctcagctttggcacatgtctcaacattgcctttagctgtaatggtgtgttctggattatactgcatcagttcctgcaatggagatatcgtgattttagtgtctgtgtcttgctcaatttttttaagatttcttccttctttaccaataagacggccaacaaagttattttgagctaaaatcttcaaggggatctcttctgtgaattttacatcttgagtttccttacgcataatctccagaatagacttacaagccgcagaggtgccttcaggagtagagaggatagtaatcgacttctcagcagcccctgcattttctttacggtggacatcgattttagactgggtctgtttggtgatgttccgaatggtggcaccttcttttcctataatggctccaacaaattgggtgggaaccagcaggcacagaggcaaatcacatggtttctgcttggacacggatcctggagacccctgccttgaggagcccctctgcccaagcccccggcgacctcggggctgcagaaaggggttttgctgggtggccatttcatcagggatataggctactttcaaggtgaaattctctaactgaaatccattcagtttgtctagtgcttgtctagcgcttgtctagcttggtccttactggaataggttacatttacaactgcagtttccgagtcagtgttcacttgctgacagctctccaccactccatactggactagtcaactatccagcacctcccactgtaagtgaggagggatatttcgtatctgaagtttccgaatcctttgcctttttgggaccgagtgctcaacttctatgggtttcccgtgcagttctattttacctgaaagcgcctcaatggccttgagggcccagatctcgtctgggcagtccacgaacgcgtagccaatcttcaccaggaagggtcccgacacggggatcttggcgtccttcaagataccttctaggtccaagggggcggcgttctcgctgaggtttctgatatacggtttgttcattgtgaagaatggttgtttaaaaaaaattaatgagaaaaacgaaaattaaaaccacccacggtgatggatggatccagctggttttgttcccctcgtcttctcgcctttaaaatacacaaacacagtaagaaccaagcacaagaacgaggagcaaaaaatcagatccgaggcttgtttttccttgtctagatatgttttaaaagagaaagaaaagaaaaagcctagctacaaccgaaacgcatccaccaggcttgaattgagctaacttttcacagtcattttttaaccataatgctcatctaccaagcaatacaggggcagtcgtgtttatcacctatgttataattttattagctgcggaatgcttattcgtatatggatgtcaatggctacatgtattgattaaaactcccttcccaattatgttactatgggaacagctagaaacatttcaaatgttaattaccttttgttacacctgggtcacattagcagtcactgcatgggaggggtgctcgctttgtttggattggcattctgcctcctacacggggttcaattaacattagctgagactattttttaattcaaagaatatgcatattgtcttcattatgaagcctagaacatgattttctcaggttgccacatcagtcagatagagataccgtgtagtttataatcacagctaaggcagctcagcagcgtgttacatccaagaggctgacatacaggagagatgtcatttccttcttagtctgcatcattaaaaagatctttttttcttctgaagtctttctcttggttgctcaacatttcttcacagaaggaatatgaaggaaataaagtgatacatagcaggcgaaatcacggaagcaggattttgtttagaagaatgcaaggctgcactgactgactacaattcagaagagctgcagctgccaatgtcctttctgcaattcattaaccttatatgtacctttccactttaagggattttttccactcaagaaaaaaacaaaaggagaatggaaaaaattatagaaatatgaaatgggacttacaatgaaatagaataatttgcatatttttctcaggtaacatattttataagacaatttcaattcttccagctgctgtcttcagaagagcttaaatataattctggatattattttcatttaaaagaagatattggctcacacttcttgcagaaagctgaggagccagaacttgacttcgtataacagaggtgagagttatatccggaaaagaacaattctcccctccaaattaggacaagttcaacaatatcctaaatcacagtgattttaaatacttttcatgcttataagagattttaaaatgaaacagcaatctgtgaggtgttgatagcatgcagtatgtagccaaggtgacccaaggtcagtgtctccttctagatgcatctgcaggtagttagcattcgccacccacacacctggcccaacaggaacactgacgaggcatgcgcatactgctgatgaaatgcagcctggtttgctccagagcacatgttttctaaaacacacgtgtaactgatagacttagcgactgactaggtgtgaagataatataaaagttgcattagtcatgagccaatttctctgatgcactcacgttttaagtcaccgtgtaacagcaggtctgtgctataacacaaaggactgtgacacaggtgaacacagcaagacaccaggaacacacttggatgcccatcggccccaggtttcttctgctggtcctgtctggccatgtgtttgggtttgaaagtgtccagattgcctggttctcctggatcttcacgcaaaagaaacgagcacatgatggtgacctggaactctcctcgctggcgtcactgcatttttgcaaagcctgtaactgtcctgtctgcattctgggctccaaggctcagtcctctgatctttcctgacctgtccttcccctaggctgccttcctctttttccttattacagtaaagttctgtatgtactgcagcatattccatttattgggaattgaatatatttcttctatgccaggatttaaaattaggattgttaatattgtggtttgtgctctggttacagaatttctaaggtttgggtgttctatcccagcaccatattttctcaaagccttgctctctgcagtgggtgattttgcacaatgcaaacttctcaggtactttcttctgagctccaggtccccatatccaacatctactcaacatcttattctgagatgttcacctcaaacatgtgagaatcaacatgtcaacatgtcaatacctcttgcaggatttcctaactccacagatggtatccgtccaattgtgcaagccaagagcaaggcgccagctgggacgtttcccatacccaatctatcatcatgtcccattaaattttaccagtagtgtttctcgaatgtgtccgtttctctttgtctctgctgccaccttcatcttacacctgaatcactgcagcagcctcctccctggccacagcagtctatgaaacactaatctgagcagatcaccaccctccgcacaaacccttagggaactagaagaaaagtcgctcaacttggtaaaggctacattacaaaaacaaccagtaaacatcacactcagtggagaaactttaaaatcagaagcaaagatgcccattaacatcacaactgcttagcatggtactaaaggtccttacagacaaaaaagaagaaagaagcaagaaggagagagtcagaaaacaaaataaattagtggtataagatttggaaggaagataaaaaacatccttattggcagatgacacaatcctagacatagacactccaacagaatagagactattaaaactaacgagagttcagtgatgttgatggatttacagtgggcttaaaaattactagcaattatcctcacctattgatacagactgaatgtttgtgtctcccctaactcttatgttgaaatctaatcccaagtgtgatggtatttggaggggggtctgggaggtgattaggtcatgagagcaaagccctcatgaatgggattataaaagagaccttatgaaagagactctagagagggccctcacaccttccaccacgtgaggacttggcaagaaggcactgtctgtgaaccagggagcaagtgtccaccagacactggatctgtgggttcctcgatcttggacttccagcctccagaactgtgagaaacgaatttctgttgtttataagccactccgtttatcgtttttcattacagcatcccaaatggactaacacacctgcaataaccaattacagtttttattaaacttaagtggtgaaattttatcaaatacctctctgtaccaattgagaggaccacatggctcatgttgctatcaacaagaaaagataggcaacccaacccaaaaaacaggccaggaatgaaaacagttcacagcaagagaaatgtaaatgactggcaagtatgtgaagagttcctcaactcagtcaatgtaaccagaagaaataaaatgaggagaagacaattcaagccatcatatttataaaatgtaaaggcgtcatacaaccaagagttggtgagcgtgggaaggaagatctggggcctcctgcaattcttctggaagcgtcccctgccgtgactgcatggagaacacttgagcagtcatgaagatgaagaacgagtatcatctgtgctctttccatcccatgctgcatagcctggagaccccagacccccagccctccacgactggatgggtacccaggcaaggggacagctagttaggcaggctttacgcacagtacccagggggaagtaaagccccgtgccaactgtctgtgcaaaatgaaatatcacacgcacagcctgttactgtgtatcttaaaggatacattcatatctaagaatatagagagggtgggatcgggaggaaaagtaaaatagtattaaacaagaagagtcttattttgacagttgtgctagagttccttgaatagtagtaacaaaactctgcataggaagtttttgaaaaacattaagagtaaatggtcttcagatttattggtggaagggtgacagccattcaaatggataagttcaatttaggagtgaatattactcaaaatagaacaaagtccaacatacctataattagtgtgcaggaagaagaaaagtacccagcaaacttgagagtaaaggctgatcagagaagagagttagcaggcaaaggaagagaaaaccagcatctgctagatgccttccttgtggcagcactggacagataaccctttgtgcaatgccggggttgccgggaagggggcagctctgctctctgtgcagatggacggcagcccggcagccacgcagcccgcagagcagagccgggttagagcacagttccgtctcacccacacggttagggagctccaaccatgtggcagggagactttcaggaataagtgaaggtcggtttccaaagtgcagcatgattcttagtaagcaaatattgttgattcattacaaaggtaaatagaaacagtttcaatggagcagtgaggaacaaaaccaggtgactgggtggtggggaagtggcagaggaatgaaaatgacttataaattaaggatagtgaatatctgggcacgtttaaagttatggatgacagtaatggaaggagtgcagaatcaaggcccagggtcattataaaggaggaggtccagacaggtgcacctggatcagattgggaggtgactaaacaagtgacctaaaatgtataaatatagtaccttaattatggtgatcattattacttatcttcagagagtaatctttctttctttctctctctctctctcttttttttcagggtcttactttgttgcccaggctgaagtacagtggtgcgatcttggctcctaggctggtggccttgacctcccaggctcaagcaatcctcccgcctcagcctccagagtagctggaactacaggtgtgcaccaccgtgcccagataatttttgaatattttacagagacagggtctcactatgttgcctaggccggtcttgaactgctggccttaagtattccacctgcctcagcctcccaaagtgctgagattacaggcatgagccaccacaactggcctgagaataatttcttttgctaatattgtacaaccacagaaaaaaggaaaatattctccggtagaattaaatctatatacttacacttatttattaaaaatatttgtgttttttattggatctagaaaaaaacctgatttaattcaatatatttttgtcactatgtattaattctgttggaaacataataggattgagcttgatgtcaaataacaggatgaaatcttttttttgcataaaggaacataaaactatttattgaccactcttcacaagtatttacaataaagtaaacattatacagttggataacattctgattactgcaaagtggtttttcctggcttttgaaatcacttttaagaatagttaacctggacttgacacagaaaaatctcaactctcaaaaagctaagccacaccaaagaaactgctttatcaggttgttgaaaacatttaggatgttaaaaataatttcagtataaacaaaaatgctttcttccttgcaacttccattcctcctgccttggaaccctggcaaaagctaagaagttagaagacattccaagacgtttcgcaggtcctgagaaggtacttacacacccgctgagagttctcgtcaccaggcagtgcacactgctaaacaggctttaccagtaggcctttactagtactatttacagttacaataaataactttctctaaagttttaccacagtgacttccttctcatacaattgaacttgctcactttcaagtgtaattatatttttgaaatacatacttctgaactgaagtctccaccattaattttcatgggcaatacatgataaaataaatgcattgtaccacaaattgcaatgtattaagttctgtggagtaagtgaagccagtcatgtagacaactgggagagatatgaaatagaagtgacacaccgctccgtgttgatattcaaagtagagaaacaaggaagaggtgtgagccacaagctgtgagcctgcagtggggttccatacacattcccccagccgggtactatcggcttgttttagcacgcctcttatccgggttgtgcctcagtttcctcctccttaaagcagcactgaagttcatctcacctctgcttccctcaccggttgtcataaagatgtaacaagataacggatgtggggtgcttgtcaagctgggcacgcatgtagaaaatcattacttttattaatggaggaataagaacaatagtcccagaagtcagaaataaagacacaacatatcctcaaaatatccttaaaaataaacacatgggctgagtaagttggctcacgcctgtcatcccggcactttgggtggccgaggcaggaggattgctggaacccaggtgctggaggctagcctgtgcaacatagtgacactccatctgtaccaaaataaataaataaataaacacatgaccaaaaagaaaaaactatttgatggcttcgctttatcctaatctcaaatcacattgttattctttacatcatctttctttcttcataaaagtcagaatctcaaaggaagttggtcaagatcctgatgtgcagatgggttaagaggattagtaaatgtcaaataacaaaataaaaagaagaaagggatgaaattaagtcctggcacattcctcagttagttgtatttcctctttctggcccagacatcccctggatttataggtgcgtaagtgtcccttctcgtcaccaggacagctttaactaccatcaagaagtatttttcaaataaacacttcagtctctgtgtctgaagtgtttatttgactgatcacagctgagaacaagttaggggttgacaaggtcctattgtgggcagaacaactgtgattttctaaatggaagcacatctttaaaactgtaagagggtttcagttttcatgtacgccatattctattatcgaaccagaatcttcactctgaagtactattcaaaatcctgatggaataataatcaaattgatgcaacttaggtttaatcctgttcacttcttaaattatcacacaatgtcttttttccctatccttacaaatctcatagtttacctttgtaagtatatgtgtatgtcaatttaaaaaaatacaatgaaatccctgaacatctgaaagattccattcaattttgctgttcttattaaaacttatttcaaatctggagtattcaaagtaacacttgagtcataatctctacagcatgctttagcctttaatcagttatattggacagatcatcctcaaacactgctctcagcaccctgatgtcctcccaccataatgtactttgttctgtactctttgatatatttttttgtaaaatatgtatatatgcatgcacgagtgtgtgtgtgtatgtgtacggtgtttgtggggtatatgtgtatggtatgtgttgtgtgagtgtgtgtgtgtgtgtgtgtgtgtggtgtgtgtgtgttatgtgtggtgtgtatgtgtgtttgcattgtgtgtctgtgtgtgtgtctatgccatcaaatactatctcttttgattacatcctggaggtgcatgtgttatgcatccttcttctcttccaggaagatggactaggcatgtatttccctattcttcccactaagtacagttggaaaccctggacacttcctggaagatgactctgacaggaggagagaagaagtcaggatagctaagggcctcaggacttgaggagcaagctggtggagaattccctgggttttcctttgcctcatgtgtactagacctgaagccaaataaatcagcaacccaggaattccagcaggcacagacaaaataaaatcccaacaaaagcctctagccacaggaccagggaagggggcagaaaactcttagatgataactgctctactttagccaaacaacacagaaaaaccttggccccaccttcacccatgccagtaaaggctgtgtgggtggcctagaattccaccctcattagtctgtaaggaggtgccccaacatccccccaggggtggtgtccactggtggtggtggaggacactgaggactctgaccactgcccaggggtaacaaggccataagtcttcttgggattagtggaggccacagagggagctggagcctccacccccacaaagcaggaatagccccacaacttccttcattgcagtaatgaggtggtgcccccacttcctaggttggagtcacgtgagacccagtctgttaaaacagaaagcttatataagatccagagtctcataacatagtgccccaaaagtctaggttccaatttaaaaaaaaatcactaattacacaaagaaccaggaagatctcaaacagaaaaaaaaaagatgccaaaccaagatgacagaatgttagatatatctgacaaagatttcaaagcagccatgataaaaatgcttcaacaagcaatcacaaaccagcctaaaaccaatggagaaacagagcctcagctaaggaatgggagatataaagaagaaccaaatggaagttttagacatgaaaaatacaaaaccaaaatgaaaagtgcacagactgggcttaatagctgagtcgagggaacaaaggaaagaaacagtgaaatgaaggatgaagcaacagatgttctcacctcaaaacccagagaaataagagcagcataaacccaaagcaagcataagaaagaacataaataaataaaaggaagtgaagaaagaaagagagagagagagagagacagaggagaaatccatgaaactgcaaacaaaaacaacagaaaaaacccatgaaacaatgagctgattaaaaaaaaacaagaccaataaaattgacaaatctcttgcaagactgattgacagagagagagagaggagatacaagttcatatattaccagtatcaggaatgaaacagagaatcattacagatcctgcagacttggcaaggataataagggcacactgtgaacacctctatacacatggatttgataaatcagacagaatgtacgtagggatgcccaccctgctggtgcagcctgctcaggagtggctggacctaggtaagaggtccacatgggtttcaaaaagaggctcagggtcactgggggaggaaattctggcagcccaggtacctggagaatgtttttggagggaagggtgcaaactgtggataggcacatcacctgaccttcaaagactctcatctggtggtgagggcaaggccagcagcaggcagaaggagctctcaaatgctcagcgtcagggcaggggcccctctggtccagctctaaacactgtgctgagtacagatggtttttttcttgacattgccaatgagataacactcgtcaaaacagaggacgactaaggatctggagtcaagagttaacagccttcaggaaggcttagcaggctttgcagctattcctttcattatctaacaagtatctgtgagggttcttgctataactcagtatctgggccaagcatgcagtgtggggttagaaagagacgcacggacgggctgtggcagcctggggagagtgccatgcacctgcagaagtagtgtgagcctctcacgccatgatgaggtcacagttcccctgcactatctcttgatgtgtgatgtcccaccgaggcccacaggtgggctgtgtccctcgatgtctggaacatacattgaggtcacagggttctgccttcccggcgcccccttctagatgttgccacgtggtcaatggataagcagacagcacccgaggagctgctgaaacacagcgtctatcccgagctttctcttccttagtgctacttgctcaacactgcctgtgcctcatgtctcgctctctctcccctgggtgggagcacagggagaccactctgtgaagctctgggttcccgacagcctcattagaaatgaagccaaaaagcacaggcacagatcaggagaacagggttgtgacccctggaaatgacacgtctgtccctggaggtggcgtccttccccatgcttcttcccaaggtcagtttctgatgagcttccatgacctcctctgccaggccacctgtgccttcccactgcagagctcttccccatcccccggaacacaactcactttctctcttttcagggcggaggaaacccagctccagggtgacccacagccacttggatctccgggtatcagaagactggcgccaggcccatagccgggttttcacaccggaggaggtgggaggggttttcattttgttttgttttgttttgttttaataaagtcatgcttgattaaataaaatgagagaaaagtaaatttaaggaattgtgagggagaagaaagagcagattgttgtgaacagttggtgggatatctatgcagatagacagtgcacaaaaattataggacacagctactgattttttctctgttctccttttaaaggaccagtgcgtagatatctgggtcacagccctggggagaaatacaaaaacattcacgcatgatatggagagaaaataaagaatagaaatatccatgactggctgaaaacacatgaagaacaaacacagatgcacgatttatgtgttctggaagcaaaaccattcctgcctaatgcagccatttattcagctttattattctagcaagtaaaaaacacaaaactgcgctttgtgaaatatccggagggaagcagaggaggaaagtgctgcctgtgatgtcctggggtcagcactggccacgttatctgcagagacgactggggtcatggtgtgaagttccgtcgtggaggaagctgacaggcttgttagtgcgcccctcatagtcagcggtcaccacaccctgtcacccacgttaacctatcgctgctgccatcacccagttccaagtcccagtgcttcatacctcagcttccacaatggcctccctgatcccgcctttccctatgggtttatgccaacagcccagttgggttaggcttccccacaccctgttccaaccatgtccatctcctggccagccatcagtgatgaattattccttcctgtgacttcgagcctaatcccagcccacagggtatcaggcagggttacccccagcacgctgtggggatgggaagaggtgcaggccagtgttctttctgtgctactggtttgaaacacagaacacattctcacacagagacaacagcttgaattgtgcttgggttctcatgagaaacacagaaaaggcatttgactcagagctgagccctggtgctcttgtttcgggtcctgggaagagacagctgtgagatggaggcagtaggaggtgaaagaaaatagttatttactggttccttatggttgaattgtataccctcaaaaagatgcgttgatgtcctaacctctggaactgtgaatgtgatgtgacctcatctggaaatagggtatatgccaatattagcaaattaagacaaggtcactggggtgagccctaactgtgcctgactggtgtccctaaaggaggagagacagagacgcacagagggaagacagccacctggagacagaggcagaggcggggcaatgcgtccacaagccaaggagcacccgaaccgcctgaagcaccagaagcaaagagaagggcctggaacaggctgtccctccccgcctcagcaggagcccactctgccacacctccaactcggacttccagcctctggatgggagagaacagagtcccttgcttggccacacagtttgtggaactttgtttaccacagccccaggacaccaataccaggtcccaggcaaatttttgtcagaaatgcaagttggctttggcagcctgtgctgggcccgtattctggtctgttctctctgctgcaggccaggcctcaggctgtactgggcaccctcccttcccgtccggcctgtgctccttcttcagctcaccctgaggaaactccctctccaaacaccaacacatccaaagcagggggctgaggagcaaacctcaccaaagccttctgccttgcagacgtgagaaaggaaaggcagtggagggtgggcaggtggagcactgggaggccccagagactgcagagcacccctccaggcagcccgaggcgggaagcaagcccagcacagcccctcctggtggcttccctccaacttggctgggtcagttagtgactccgctgcagaaggagctgcgtcttcaaatgggaggcatggacggtagctgccaccatagaagccgggccttctccctgcatggggcacttgaattagtctgaccaggcttcctgccagctgcctcttaaaaaggagtaaacttatccaggagacaaaattgtggggatagccaaaaaatgctgggtgagaagaggaatgagagacagcttatcctagcaaatactaaaatacgatattaataatagcacaaaaaggcaaattaatggaacagaaaaatccaacaacagatgcaagcacagccgtgcatcacttaacaacggggatacgttctgagaaaggcgtcattaggtgattttgttgttgtgagaacatgacagagtgccctggcacacaccgaggctatctggtgtagcccatggctcctaggccggagcctgcacacacacggctgcgctgaacactggaggcagctgcagcttcctggtcgtgtatccaaacatagaaaagctgggccaggcatggtggctcacgcctgtaatcccagcactttgggaggccgaggcaggcggatcatctgaggtcaggagttcaagaccagcccgggcaacatggtgaaaccccgtctctactaaaaatacaaaaattagctgggcatggagacgcatgcctgtaatcccagctacttgggaggctgaggcaaaagaatcgcttgagccctggaggtggaggttgcagtgagccgagactgcaccactgcactacagcctggctgacagagtgagactccatcaaaaaaaaaaaaaaaaaaaaaaaaaagaaggaaagaaagaaagaaaagctgtaagtcctcacttcaagtcattgtaaggttttggaaacagacttgaagcaaaatgacatataactaaaccagttttatcacaggttaactgatgtcaacaagagttaaattcctgcagcatatttcaagccacaaaaccgtcaccaagcctctaaataaagaccaaaccgcttctaatattgaacatggaaataaatgtaagctatgcggacatttaagaaaaacagaaaaacaaataggacgatgatttcccaccgactccaggccagggtctcgagttgccggagcctgtcccggcagctcagcctgtcctgcgaggcagcccccatcctggccaggacatcatcccagcgggcatcaattctttttcacatcatcactgtatcgaaatgacattgaatgaaacgacgtcatttgaggacctgctgcacaggtaaaataccgtattatactcttatgggaccaccttcagatgtgcggtctgctggcgaccaaaacgtccctctgcactgcacggctgcatatgtaagaggttaagacatcgtgatttgtgaagtcagaatggaaaaggggggttgtaataacaaattattcatttggaaaaatagttaaatccctcattatatacctcacaacctaaaatgtcagaaaagacaaaagcaaacgtgaaaatttaacacggaagtaccagaataaagtaagggtgatcatttatgccatcttttgatggatacaacttttccaagtgtaaagcatgactaaatttaaaactttcggatgtcaaaacactgtaaccgaaatttaaataaactgcaaaaaaaaggttttgcgacatgcatgcaaagcatcagtgctccacgtacagaactcacacaaatgaggaagagaacaaggaccttgctcatggctgtgtaggaggatccggagccagaaggagcagggagtgaggatggagaatgggctgctgggacacatgtgggagggagatcaggacacaggctgcgagtggaggccacgcgctcacctctgcaacagagggaaggaggtggagtgtgtctgtgggcaactagcaggtaaggaagaggagtctgagttcgtctgaggctcaggttttgcaagggggtggaggcatcgccattgctgggaacaaggagcagagcattgcaaagaggttaccaaaaacagtgaacatctgggatcattgctgtgtattccccgcaacagagagctgcagaatggcccaggtgcgctgtaggagatggaagagaacaggaaccaaagaccagccacagcctggaggaatggttgccaaagaggctggcgctgggcacacactggcaccaggagtctctcccagctctgctctgccaccctgagaatgggaagaaggccagggaattttgcaagtgggagccaggtgaggagagctggggttccaaggaaactgggatgttaacagggaagagctcagcagaccactggcagtgacagatcccgcgggtgaagttggagcagcgtggggttggaagggagtggggtgcacagcacacgttccatccagggcgagttttagattccagtggtagtgcatatctctctaagatccagagtgcaccagaaacacaggtcagcatgctgaaatgacccagaaattttaccaggggtgcctctcacaattaactgtacttgaggcaagcccatttgttatagatttttcgccgatgattgttttattatttgtcatttttcttttttcttcttttctttcttttttttttttagacggagtttttgctcttgttgcccaggctggagtgcaatggcacgatctcagctaactgtaacctccacctcctggttcaggcgattctcctgcgtcagcctcccacgtagctgggattacaggtgcccgctaccacgcccagctaatttttgtatttttagtagagacaggttttgccatgttggccaggctagcctcaaactcctgacctctggtgatccacccacctcggcctcccaaagtgctgggattacaggcgtgaaccactgtgcccggccctatttgtcatttttctatgaaggcaaaagcaactgtgcacatttaccctcacttccccttaagtagctttctgagctccaggcacaaagggaactagggaaggtcttatctagcacagggcaccatgcagactggcagatagcagttatcagaggctggcatggggggaggttagtccccacagtgccgatgtaggaaataatgctcagccttatgtgaggctgtttgagtttccaaggcacccctaaactaatccatcaggaaggcagaaaaggctttggagatcattttccccttaaaaagactaagcattccatgttcgtttgaagaaaagtaatagttgtaaggccatatcaaaatctaaaccaatacatattgacttttttatcatacaataaaatgcaaccgtatctgaaaatacaagacacgagtatttgtacacattctctttaaagtggttaaaataacttggcccccaaacatgaattaatgaggacatgcacccgagaaagtagcacatacttcaatacagacgtatctgtaaatctcacccgctggtgtaagatagctgccccgcacatgtgcacagaggtgacataaacttggcaggactttcagatcggttatgtctcaataactgaccttaacttaatgaaaagtgagatcccaatatttctaaacacaccgaacagctcttttgctttttcatgaacctagagaggggtggaacaggctaattaggttaaaagtctaaccattagattttttcttatttgtgtgtctgtatacaggcatatatgagtaaggattaaaaacattaacatttaaaggttattgactttgacaacaaggccaatatacttggcaccagccggcaaacttttctctacatgtacaggtagcaaacatttttggggccacacaacctctgtcacgcctgctcaaccctgtctttacaggggaaactgccacagacaacacgtaaatgaatgtgcatggctgcgttcttagaatgcgtattggacattgctaccatttagtgagctcctcttatgtgcttggaatgcactatttataaactctcaggttgggaacataatgttaattacattattcatcttccaagctcactacaaagaataggtttccacaaatgcttatttatggacattgagatttgaatttcatacaatttttatgcatcatgaaatcttcttttgacttttttccaactgttaaaatatgtaaaaatcatccctagctcacatagccagaatgtatgcaaggtttgatatcaatgagagctttaaatgaatttaagcttgtttggaaagacaagtaacctgcaatctctccttctctgccattttaactgcctttgaacaacacatgtctgtgacgatgtatctatgaaaatacatctattttgcatggtcttcttaaaccccacaatggatactctgaaactaactcagtgtttgatcatgtattattaaatgtcaaaggaatgattaaatgaatgcatctccaactctactcacttatcattaaaacgttcatcaacggagggatagtcaatctcactagtttcagactgaaagccgactactttcggctcaggaactgcaagggagcatgatcatcagtcttgcattgatcccaacaagcatcatcctagttatgctgattagagtatatctgggagatcttataaagaatgttcatattataatttgcaaatgctatgtgccaactttcaaccacagtttccagaaggaatttcatggcaaatttctgaaagagtggcagctttgagatatgtgggagaaagaagttaactctaaacctttagctggcttaaattcccaattcagaaatcttcaagccccaaaataccctgagtgctatttcttataattactattaataagactttcacttatgtaaggattcctcattgaaataattcaaggcacacttttaaacaacaaaacattgtaaagtgggcatctttgtattaaattcctattcctattttattttaggtaataagtattcaaattttggtgaaccctatacaacaataactaccatttagtgagctcctcttatgtgcttggaatgcactatttataaactcataagttgggaacatcatattaattacattattcatcttctaagctcactacaaagaacaggtttctaatcattataataaatggagaaatatgtcacctaaataaaagaatggatgggtgatattgaacacagaatatctgcaatgcacttcttttccccaaaggaacccaggaacccagatgaaaatccaaggctctctgactgcagaaacggagctgtcagtcaccacctagaaatctctccccaaaaataaaagtgtaagagaaagaaaggcattatcaaagaatctaggaagtccttgtatgagaaactagcactaaataattcactttttgagatagtttgaacatatttctaactctaaataaagggaaatacttggtcataagaaaaatgacctctgtgtattaaatgtctagtttgtgcctcgcattttacattcatatcatatcctcattatggacagagtagcccattccaatcacccttattttactcagaaggaaactccggcacagcgagtttgatttgtgcagagcagcaaggccgtacctgcctagctgccactaaatcacagggagcctagaacctcccacgaagcagggatgagctcctgtgtttaatctcagatagttgaggagaagacgctttgagaagctgcatgtttaacactaaagggtgatttcacagttaaaagtcatcttacatacacttcacaggaaatggaaatgaccccactagtctgtgtacctcttaacacctgagttcacacaagcaagtgctccatcgttactttacaaggtgactaatttcttaacaatttcacgaggatccctacttgaaatctgtcactcagattggtgtgtctaatgaaatggtttaacatcaaaacatctatggataaggacaaataacacaggaaaggtggaaaggcgggggacatcgggggtgcgactgagggtctcctctgcttggatgggtttcctcaaaagactgcagcctccaacaagagagggaaaataccggagaggcaaagttacatctgacaacacttagaattcatctgacggccaggacccgggagcacaggcctagcccagacactgggtcctgacgtggccacagccacagctgaaccccctccattgccacatccctcccttgccagagattttaccagatggtgcctagtaaaagaattttaaaacttctagaagatcaagctttccaaatggctctttcttaacagaaactttctagtttcacgaacaaaatcacagatgaacatgctagagcttcgtaaagctaggcagctttccgggcagtgctgggtgatcgcagtgggtctgcgtctgggcccctccttctaagaccgagtctcggggacgggaaagatgcacagctgcttcaggagcatttcacccagtgggcgggcggcagagttagcagagctggactttaacagaagctcccgccccaccttgcaacctcgctcatcagctcagctgcttcccccaggaggtgccagctcagaggaggagccggtgccagctcagaggaggagccggtgccagcctcggccccggatccagatcctctgactcaaaaatagcctgattcctatcatgcttcctcgccggcagggataccaccatttgtgcaaaatgtttaggtacacatttcacacatatagactcattaaaatagtccactttatttggaatgtcatagtggagtaaatataaatacagtaggaaaatataaccagaaccaaaatataatcagaatataatacaatcagaaaaattagaaatataagcagaataactcagtaggtaaaagcagtttgcattttaggagttggtgaagaaagtggagtgtgactcagaaggtccaatcatccatcctaaattccagccctgtgttccaacccctgcatgattctgccccaattcaaaaccatgctggaacgtgagcttggagactggagatcccacacacagaaggagaagctgaagacgcttagagtggaaaagcgttttgtaaggcgggtcagacactcaacaaagcaggtgaaagtgatggaaaaatggaggagccgcagggggtgggaggcacagagggctccccttatcttattgtattttccctctttcggttgtgaggacagtccatcctggttctaaaatcaccgtggcccacgccacgtggaacccacagggcccacagccacagaggctggggtggcacttccaagactggtggctgcaatgggagtggaatgtccacctggctttgggtccgtgaccctcactagcctatccctggagttctgtaaaaagaagagccaggacacctttctgatggggctgcccgagcttgttgtggatgcggagctgttgaattctccaatcccattctctgaaacgcttgatacacgtgcttctccacgtgaagcaaatgcctccctttttgagattcgtccttcagtctactacttagactttacctccagtgacacttcagtttccatgagcttcaatcgctgcattttcagcccattcctctctgcatttctggagtaatttcggttactctttgcacagctccctctccgagtccacaggactcatcacaactcgcgagacaccaccgcctccaaggtctgtctgtgcctacacttggcgactatgacaaccgttaagcgatgcaaggtttggggcgctgcaaggacttagagaaaaagctctgtggagactacagtaaaagagcccagaatactgttggagtaaggcccaagtaaagttgtcaacaagtcagggcagatgtaccttaaatggacccccgcctggtgggaaggctgggctggggctggcaggcttgggttgcccctgcctcgaacgtttcctagccctgccatcctggctcagtgcccagcctcttgctcaagtccccccttctggaaagtaaagcactaacttttaaggaccagctgaggtgccgcagtgaagaaggtggcctaggccccccagatggtgtgggagcgacagaacatgaatgcactgccttcctcaccccaggggggtcccacacgtgtgcaccgccttccttacccctggggggtcccacacgtgtgcactaccttcttcaccccaggggggtcccacatgtatgcaccgccttcctcagctggtgccaggggacccccagtagtaccaggaaggccgtgccagtacatcaaagtggcagccaggatctaataacaatacgtaaatacaaacagaagcgagggcactgtttctcagttgggtgcactgtgattagaaaataaagtccgaactaactctatagttaggaaatgaccgaatttttccctgagtcataatttcctttttctttttttcttttcttttcttttttttttttttgagatggagtctcattctgtcgcccaggctggagtgcaatggcgcgatcttggctcactactacctctgcctcccggttcaagcgattctcctgcctcagcctcctgagtagctgggattacaggcacgcgccaccacgcccagctaatttttgtatttttagtagagatggggtttctccatgttggccaggctggcctcgaactcctgacctcaggtgatccactcttctcagcctcccacagtgctgagattacaggtgtgagccactgtgcctggcccctgagtcataacttaaagtatgtttttgtaatatgtttcatggacacttaaaaggtaagtataatctattttcagggtgtggatttctctctttctctgcatatatgtcatacacatgcacatgtatggacatatgtatgtatgagtatatcaaatatgctatattaagtgtgtatgtgtgtgtgtatataaatatatttgcctctgatttgtggtatcctaacagcaatgagttaaagtttcctaactttgtaatactttttcttcttgtattttctgcagtttttgcttcataaattttgacgctgttacttgatttatggaggtccacggcagctagctctttgttgtagactgtgcctttatcattattctaagggcccttaacatttctttgttgaatttaaccttgcttgttattcatattgaaaactgatattaaaaaaaaaaacaccaaaatccttttataccagactttttgagttactctttcacagacacattatttaaggtgcatttcttaatccaagtgggtcatttttgcttcttcccgccatctgagaactttgtgaggtgtgctcaccccacttatgctttgtgacacggccacggcctcagctttgtcaccatacgtcaccgcacaggtcctggttttcctgccgcctgtttctaatctgtggccatttggcctggtttcctagtcctatgctgagggtgcaggttcctattcttttaacgtggaccatctgcaactggttttaatttaagagttttatgatcaagacaaacatctatttcttgattcatcagctttacacagactcctgtcatagcctagtctgaaagataaacaagttagctcacgccctcccctcctctccacttgcatttttggtttattagattataatacttagtttttccacccattcaatacctttgtattcgacttctcaagttgaaatgctctctactaactctctgctcagagagttgaggaaatgaaaacagactcttctcacctcatcttccactgttctagcttttgttatgttctcttctgagagcaaaaatgccaaagaataatcccacgttctttggctttagttttatattcaaatagactttttctatttttcatggtttttccatttatcccttggtttcctggactgagtaaaaaaaagtcttttattttttttaaagaaaggcttatgtttttatgtcactccattatctgatttttctcatatttaaaaatgtctcagttttctttctccttgaaaacaaccttagctctgtattaaatcctcacagattatgtcacatggtgtttttctctttaaaaattccatttgggaacaaaatgtaaatattataatgacagagactaggtaggcacatgacagaaggaaactggtctaccaggtgcctctggtcgccacccctcaccctccccttcagcctcctagcccagcccagcctctttctccagcctccgagagcccacagcaggtggacagctccaggcagtcagggggagcatccctgggagccacctctgtgggtgcctcgaagggaggtggaggaggtggggcgcacacacggaaccaaaggagtgtgaaaggacaaggagctgggtgagccagtggggggtggggtgggcccacggggagaccctcactccacctgccttctcttcagatgctggggacgagagtgaagctccgagtttctgcttgcacagcttcctcgggccagcgtggacgttcccgacctgccccacagcacagagactggctccaggtatgccgggcagggaggctcctggcggcgcaggcccagagggaaagcagtgtcagctgaggggtggggaggaggcagagggcgcatcacttgtgattccccagctttgagaggagctcacagaggcagcttttggggaaccgacagatttactaaatagcaccatgctgaatttgaaacagccacgccccagaagctgatcagaaaagattgttttcaggccaagagtaagatgtaagaatgtgctgtgaacctttatgattctgtgaaaacacgtggcttttaggtcctacagaaatgcccttaggctacaatatagaagatttttttttttttttagtttaaaatcttacttcacataactactttgataaatctactatttataagcaaagtcctagccacggccatctgatgtggtagaagaataaactgaaaagcagacagtacctaggacaaggacagaccagaggctgacggcttgcaagtagatgtggaagataaagaagtagcaatcctggggaaagggctaaactccactgggggaaagttccattccacctccgattcctagagctgcaagcagcaagttgacacaacacttagcaaactcttagtcacctcccgagagcccagaccctgtagcagaggcttctgtcaccaatgatcattccccaagtcagagacatggaagggaaatgaaagaaggacatgcatcctgccgcccatgtcagacacacgtcccttgcatgaagaacttaagacgtttctgaagtgactcaccaactgatccaaaatatataaccgtgatcaccttaaatcacataaacatgatcaccttaaacagagaactggatctcgtgtactgatgctgctggcagcattggaaagtgactcttacaacttcagttgcgataccggtttccataagcttctgtgaattcttgtcaaagctttaaaactgaacacggcaacaactctaggtgaggagtgtttggcagatgaaacccctccaccagggaggtgacgggtctcagggagtgtgtctggcgggtggggaggaatcccaggcctggaatctaccgtcctgggtgctgtctcctccaccacgtaagccaaacctgatttccgtgaagaatttcccacttgcactcatgaagacatggccattcccaggtatctaggtgttcctccactgatcagaaacttacacgactttatcagaagcactctgagatggacactgctgtgttcgttcaccaggaccacatatcccaacagttccccataacctgggggtggtttctcctgagggcatttatataattagcagctagcatcctctttttcaggtagctcataaagacctggtccaacaacaaaacacacctcacatgtcgttcaacaggccatggaatcattctgctgatgtgtgaaagaattgaaagtaatgcagtttacatcatattattatatcgcatcttataattatagatcatacttaaacaaacaaacacacacacacacacacacacacacacacagctgtaatgcaatatatgctgtaatgtgttaccagttcctgaggtttggaagatgggtcatgaaggttgtgatgcctggtggcagtgctgctcctaaaacaacaccagggccagcacccagaacatcagcaccctcaggtatcagcaccctaagcaccggcactgtaatgtgccagcaccctaaggtaccagaatcctcagggacggcacccaaagccaccagccccctaaggtacagcaccctaagcaccggcactctaatgtaccagcaccctaaggcaccagcatcctgaacaccctcaggtatcagcgccctaaagcaccagcaccctaagtcaccagcaccctaaaatatcagcaccttaaggcaccagcagcctaaactatcagcaacctaatgtggccccctggcctggtgcagtgctgctagataaaggggtcaggaattgtcaagaggtaaagccacagtttgtaaaaaacagcagcttgcaaagctgaaaatcaaaggccagactacagcttcaggagccgagcaccagtgaccctctgataggggtttgccacccatgaattcaaccaactgaggaccaaaaatatttgggaataaaaccagatggtcatgtccatactaaacagactttttcccttgtcatcattccctaaacaatatggtatagcaactatttccatagcacttaccttgcattgggtattataagtaatctagagataattacagaatacagaaggatgtgcttaggccatgtggaaataccatgccattttataggagggacttgagcagtgcaaattttggtgtcgacagaggtcctggaaccagatgcagaggggtggctgtactggggtgggtgctcatctgtacgaatggggcggactggccagggtgattcagaacaacgttcccaggcccagtcactcatcagatccctgcccctcatggcagagacccaggttccacgtggtgtgggcaattcccatgacctggacgcaggggtcccccggggtctcgtgagcttccagggtaagaaactgctgtcccagggagcgttgcagtggataaaaaagagtcacccatgggtacatgacaagcctattcttctctcttccagtttgggcccctttactctggtctctgagccacgtttctgcagtgcccagggaaagagtggacggcttccttcagctgactcagagaagccctcctccccgtcagccagactcacaccctccagcacacaatccagacaaattgcttgaccagaggaagctggaaattattagtgttgtcttgattttacaatagaatctgtggaatgtaggatcaataccacgtgcttactttctcacttctaaaaaacggtatggtctcgacgcatacagatcagctcttgctttacagctggagagagctgggcatggggactgcctggaggggtcgggcacccgccaggcaggtctcatgtgggtgatgtccacgacattcttggaaacaatcattttagtgtgctaaaactggcatttctcaacctgtgaggtgtagctgcatccctcctttggtttactttacttcagcatttacttggtgtgctgcccttcactagccagacagaccaaaggaggaagtgactgctgcaaaaagtgaccacaggctgacacatggagtgctcccctgcggaagggccaccccacagcaggtgtgccagcatgctcttccctctcatcgctccctctagccctcctgccagggctgctgagtagggggtagcctaggcagagcgtgaaacaagattgacatccatcggccagacaaccccttccagctgtcacctctgctgcccattcacagagcaagcagtcgagggcccttcatggctgcctacaagccctggtgcagggaacgcacactgcctcaggcaaacagagccagccacagggagtgagacatcaaagtcacctgccattgctcaggatgttatttctttctctttctgtgtgtgatggggtctcactctgtcacccagactggagtgcagtggtgcaatcacggctcactgcagcttccacctcctggggctcagatgatcctctcacctcagcctcctgagtagctgagaccacaggtatgcaccactatacccagctaatttttttgcagagatggaattttgccatgttgcccaagctggtcttgaactcctgggctcgagcagtctgcccaccttggcctcccaaactgttgggattacagacataagccaccacactcaccctgaaacatttatcttgaaggtctaagaaagcaatgttttcctctaacgtaacttgattctgttctctcggcttttcttgaaatgtctggatcgttcaatgcaaccaagaaacttcccatgctgttagtaagggccatatatttccctgatcaaagtactagttttcttatttatattcccctgtaacatagtgtgtgataaccctggacacccacttcctgtgtgtgacgaaattcaagggcccttctcatcaggtttgactgccaggttgtctaaatgggcttcccatgaggagaagcaatcccactgcaggagggtttttctccaccttttttcgtaactggtctaaagaaataaagattttatgtttcatcaagataattttctgtgttgcctttattagattttctgattgcttggaaaaactgagctttagaaggattaagattctcacatgcatgtaactttctatattgcttttgaagtctttgatcatcactctggttaactgaataactgttattttacagtgacttgtgattctgtctcgctcaactgttttgaatcttttgatatctttggcacatttctccagaacttttatctggtaaactgtatgggaggcattgtcaaatgataaattatatgggaacttctttagtttggtttatgagttatggacatttatgagtatgttattgatataaatattctaaaagttatataaattcataaaaatatgtcatcagtcataattttgatgttgttaaatgttttataaaattatgtggatgttattgtgaatattctgatgattatatgaaatttgcaaaagtctaatgatcctgacatgacactgtcattcataattctggttgttaccttagaatgctgcgtgtcatagaaccaactaaattttcttgtcaattgaaaattttcatcaaattttaaccatggctagtctaagtttttgtcattcacagcttttattctaaattcttctctataaacatttgaaatcagctctagtccaaaagtgcttttcatgaaaaagactctaataaatataggtacaaaaagagaaaaaaatagtacaattaatcaaagaatacgcaaatttatgttctggttttgttaaatggttatcatgtttattttcccccaatctgggaaactcattttgatgctgttaagtatgtgctgctatgaagaatctgtagtatccgggtagtcatccggttgaggtggtttgttaggtgcaggaaaggcaacattagaaaaaaatctcagatcatgataattaaaaaatagatgtcatccgccgggtgcagtggctcttgcctgtaatcccagcactttgggaggccgaggcgggcggatcacctgaggtcgggcgtttgagaccagcctgaccaacatggtgaaaccccatctctactaaaaatacaaaattagccgggcgtgctggcgcatgcctgtaatcccagctactcgggaggttggggcaggacaattgcttgaacccgggaggtggaggttgcggtgagccgagattgcgccattgcactccagtctgggcaacaagagcaaaactccgtctcaaaaaaaagaaaaaagaaaaaagccatccaaagtgtgttttccaatgaagaggcaagtatgttcgttgggccctacatttattccttgcaactacagctagaagctgccgactgccctagtaaagatccccctagccattagagacaatcagcattggtcttgtaaatgcaaccaagtagctgatttatgattaaaagggggaaggaggggcgtggtgggggcggggcaaggaacttgtgagacaaagtaacaaatgtcggaagccatgtctgtttctttctgcttgccaacagcacttcagaaaacccctgattctgtaatgacctctagctctccagaaagatgctttgaagacaaagcaggacagagcacacagcccccggcatctcctgcttgagtcgctccattcctcaggaggtaaatgaccctggccttgccttttcctacacacaacctctgatgaggttagccgcaatgcttctgtaatctgcgaccagatgtacacttacgcccaaacctggatgtgaatttgcacggactgaagctccaccacctagatagaagtggtgggtggaaaccctgtgtggggcggtcccatggaacctctctaaaggactcccccggggccatcacctcagtctacagtcctcagcaaagctcctgaataaaactaactttaattatttaaaagcctgatttgttctttagtcagcattatttaataaatattctttcaaagtacaaaagtagatggaaaggcctcatagaaattttttattagtggtggctactgaggagacgggaagggatgggattggggagaaataacaaaactggaataccttttccagagaccttaattcctttttcttttcctttttgttttaccaataaataaataaataaccaagaaaaatactttaatacaatgtgccaaaaacagtaacatcaacctggatgctgggaacctggcatctgttaaagtcttcccgcacttctgtatagcttcatgattcccccaaaatagactgataaaaatacaatttagaagtatgtctttccattgggatgaagcattctcagaaatatctcagaaaagtccaccatgaagccagtggcacatggggtctgattattggaggctgttggagagagctgggtcaccaagccgcacagcccaggccttgatatttgcctgtccacctggagggatgtgacttccatcaggctacaaacatcctgggacagtgaaccgggaatcactgaaccttatcacatgggcttgctatgggagttcacatgatttgaaaaacagatgcccactccaagtccattcaacagccatccactgcatccagactgttgaatcttcaaccagcatcaaagaaaggagccgcctttgcagggattgctgtctaggggatggaagcgcaaagaagctcggagctcccacagatgatgttaggtgcagagatgggggtgcacccagggcacagcacaggggcccggtcagagcctcttcctaccagaggtgatgacagggggatgacagggggagctgtgaaggccaccggaggctgagtctggtggaaggaggcagggaacagccaaagtgaaggctgctctggttcaagttggtgttcaaataaaagtaagtcacaacaaaacaaaagacctgaagtgaagcctgctggcttagaggaaatgaggaaccggagcggctggggtgcagggtgggaggcaggggtgcacacttatgcatttgcccagttttgcatcggatttctggaggtttgggaccctctttgcagaagctttcacgagcctaagggtgagatgctctgccccctgtggatcgagcctaccctgtactcagggccatgccaaaccattgcacatcattttgagccttcagaacatgatatcaaattatacttggatgtcacattatcggccagaatgggagtacttttgaaagcctaatagccttaggctgcaagagtcctgtggacggcactgttcccaaagtcacagaccctttatggacatgcaggactgatgccgccactgtcagtaacagcagtggtgttggccgtcttgatcagtttattatgtcttggaactcatccttgaattaattggaatgttcttttgcattgtcgtccaggaaatttagaggccaacgagggcaggatctactcccaaaaagacatagggacccttacagtacgagttttgggtactaaccccatggctgacctttctgatctttcctcattcggatcttatattccttcttctcatctcattttcttcgtctgataatcttaattttatcttgtagcatgtatgtatggaagccagtgccagtctctttaggaaaaaggtttggtaacacggaggtcactagcatccctcgtggacagtttccatggaatgtcccaggcacaggtcacatttcagcgggttccggagctcactctaagtggggaagtggaggctgccctggtaggtgccatccctaaactgtttgggagagaagaggaagagagaagtaaaaggaaggtttctgcgtttttctgtttataaagcggatatgagcaggtttacaggctgaacagagtaaaccaatagaaagagaaatggtaaaatgaaaaactgagatttctaaggaaactgtagggtgtggagtaggatcactgctagggtgtgggaacagaggactgaggggtgttgacctccaaaagcaaaggtgcatgcaagcgaagggacattggtaagagggaggcaggaagttgaggtaagctgatagattgcttcaattttccccaacaataggatatgagatcacctgtttagaggttgggacaggccctgaggggagagaggaaagttaggtatggcccctgaggggcaagggggccgagggctcctggcaggagcttaggattcatggctagcagcaattctcactcttcttactagtttataactcccattagcagaacccgagcactcttgcctcgtatacctgtttctctccttagcaggggtctaagatgttgacatcgaccctttggagtaagggtttatactgacatgaattctcaactcaagattttctccctaagggccacctacccaaacggaagagcaataggtcctcttttccatattcaggtgctaggaaataaacgtaagctatcagcaagccatcaccatcttaccatccaatggtatataattactctgtgctcacaagcagcggctgatattggtgaagtaattaggaggttcccggcaatcatttctttcatgtcccaattaagacactcagccattgttcattaggggtgttaagaaagtcaatgaatttaagcacaggtctgtggggcctgaagcactgcaagagtcactgggggcgtgctgattttccctgtgacaatgtgccttattcaacatgagagggagcgtgtgtggctgaggctggcatacctaagaccatggaactggtgctaagcagtgccctgctttatttataaatcacttcctcctttgggggtacttaaatattttataaatttgtctcataaaatgttaaacatcctcacctttaccatgacagtgttttcacatacagaatgagaaaatatcacagattttgaaagttcctatcctcttgttatggcaatcagtgaaacattattcagtcagaaagaagtctcagtttagaaactgtaaacctttatgtctatagccttgcactgccactgaatttagatccaatttctgaattatatcattcacaaaaagaccatcttggattaagtttccatcaaacttggagaactctgagaaggccctaagcgtgtccatgctggagaagctttggcaggataagaagagctggaaggggcatcctcctgcccagccactccgcttcaggctgtgctgcagagaaacttctgcacccatcaacaaggaaatatgtttatagcaattatttgcaaaagcaaacaacgtgacacaaaacaaaacaaaaaactgaaacaacgtgaacatctatagtaggaattgacaatactctcatggcggactagtctccatttagggcagcagtccccaatctttttggcaccagggactggttttgtggcagataattttccatggatgagggtgggggacagtttcaggatgattcaagcacatgacatttattgtgtactttattcctatccttattacactgtaatatatcatgaaataattatagaactcaccatcatgtagaatcagtgggagtcctaagcttgttttcccgcaactaaacggtctcatgtgggggtgatgggagatggtgacagatcatcgggcattagattctcaggagcatgcaacctagatccctcgtgtgcacagttcacaatagggttcaagttcctatgagaatctaatgctgctgctgacctgataggaggcagagctcaggcgataatgcaactgatgggaagcagctgtcaatacagatgaagcttcgctcactcacctgccactcacctcctgctgtgtggcctagttcctaacaggacatggtctgtggccgaggggttgaggactcctgatttaggaaaacactacaacagacagctctgaaaagcttcgtaagaaagaggcagcacactgggtgatttataggtacaaatatgatccaactgaataatgtactcattgttaaaaataggtgtaggttcccaagtgataaagaccatggtaaaatttctggaacagtcagacccctcgaccaatgcagaacagctgattttctagttatttatcacctaagtaaggctgaacatatacaagtaagttggacataaaatctacttgtgtgatattatctgtttcaacatcagaaaattattggggcttacagagctgaggacatttggactttatgtcttacatgacagagttgaagttatttgtctcaaagtatattcaatccactgggtcattttgttctgctctttcttggatgctacttcaaagcagtgatctccactgagattttctcaagagtcccgtggcatcattctgtacagcaggggcacaccgtaactgtgtgttgcctgaagactattctcaggtgattttcacattaaccctttacttctgccaccttgctatttgccacttagtgtcattaacagattggattccataatgctccccatgtccttttcttcctattccttttgatttctccagtaaaatatatccaaactcaatggaaggtcacaaaatatcaagattccatgtcttagggaaagtgaagatcattccattttttttcctggcaacaaaaaacccactccaaagtgtgcaaaactctaagataccatccacagttcatcctgtccagacagcgggcctgcatccatgaggctggccgagggtcgccacccaccccgccctgaaagctctatggcctgtgtcagtgtatcaggaagtgagctctcctctcagctggaagcaggaagaccagagaggctgactaatgatgggaatttcagagggagcccgagaagcctttctcttccagttgtaaagttcatgaatcaccatccagctgccagtcatgatggcaagaggaaatgaaaacagaatatctcctagcagaattgacaaaatgggaaaatccctgaagacatgtactcccagaaccataaccgatgcagggggtggggagggaggggctgggaggggagaaaagggggcaggaagggaaagagagcggcaaagcgcatggagcctacgcttttttacagacgcaaaaagatagatgcacattctttgtcaactgtcacaaacgaggtccttgattttcaatttcctgcaatcctggctaagagacacaatttttaagacattcctcatcagttgccaaatattgattattctctgtttagtctacaatgaaccagatcacacttgtaatattatttagaagcaaataaatctgcaaggctattggcgtctctccctaataaatcgtgtggctgccatgacccttcaccccagcggcagcctggtgtgataattggtaggtaaccagtttgcttttcactctaaaaagtgcttaattgtctcccttagatttgtaggcatgcatagccagacacctcgagaaatgacgcacgccttactcatttataatcagcatcaagcagacagtgaaaaatctataaattagagataagcatcacactccagaggcattaaagagaattctaaacgtctcctttgcaaattgttcaattaaaaacagaatgagctttttcacaggaaactactactgactccttttaagcttctaagacattcactgaggggcccctcccagctttccaggctaacgtccggataatccccccaggtacctgggccatggatctaactcctgtgatgctataaaggactctggtgacggttctgaacttgacaaatgccgtacccaaaatagtatattccctgtttagacgaactctaaattaaactcaaatccctttggttatttttaaatctgtattagttattttctcataaacagaaataactttgattatgaaacgaagctatttctcattgtgaaagaaataaaacatacagaaaagtatacaaagtaaaataaaaatgtcatgccatcgctcagagagaatccttttaatattgtttacatcctcctagaatttatatgcattcataccatattgtattcatttttaaattaaagtactatttttgctatattactgtcccatgacctgccttttgcatttagtacatgtggatatttcttccctatcaatgaacatattgaatgctagtattttattgttaaatattccaatcctgtatgaatgtacacataggttatctccagttcattattattattttaaataaaatgacagaaagagtaattataactcaaacagtcctgaaagccactgttttggaggaagtcctccaacatttggaaacccatccagtgaattccccagttggttacccagtggtctggaaggcagcagggaggtggctgggaagtggggctttgaaggaaggcctcggggggatggtccagggagaagaaaagggtctaaggccaagagcagagaccctacagcaggaaggccaaggtggaccctcaaaacagaggaattcatcacaaggacaaggaccgagaatcaggcaggcagccccagctgacactcacaaggagattgcacagtaccttggaggcaggcactgcctttcaagcccggcgtgtgtaactgtcttactaggttgactcatttaactgtccccatggccctggacatgttaccagtattgttcccattttacatgggaagaaagagaatatggctttaaataaaaacgacgtcactggataccatgacgtctgccaggaagacagcaaactttcacatagaactggaaagatatcaatccacggagttgcaaaagaaaagtattaatagagaaatgcttgagtccagcaatggaatctgccactaagaaaatttccagagacattagaggccatccatcatttcctgccaatggctcttgggaaacattcccaagctttacacagcaaatatgtagttacagcctagatatccaggtgtgcatgtctgcaagatgagtgctcctgaaaacacctataggtttccaaatgtgaacaactgaatacaaatgctagcaatattgcttcactggaaactgtaggaaaaatcaagagtaattcttaaagccacagggagggtggagaaaaacaccctaacatcagaaataaaatttacaagaattagcaaatatttataaaattcatgacaagctaagtatctgcagtgagtcactcagatttaacttgtctaaactcatggctttgacaattttaacatttcctcttttctttgatatttctcatggtgctattccatatgtaaatagttttaaatctgcacagtgctaacgctggaatgcaaaaacactttaagcagataaacttagaaatatgaactctaggaaaccctctaggtaaggatccctaactaaattacttgagcacagctgttaagtgaaagcacaaccctagacattgtggaaacccttaagcctcccactaagggaattcccattagagctcgtctctaaaatccgggccctggcgtttctactgtgagctcacagagcaggctgggagtctgttggcttcactgggagcttttgctcagtgtctaagtcaggcaaccgaatgagagagcgggtacggaaaagacaggaaaagagggtgtcgtgtgattcaggaatatcaggttaaggggaccccacggtcattgagaccaatcacactctgcaaatccctctgtctgtgccaatgcagcctccgcctaaaagactccggtgatgggagagacatctccacgtaggagccactggatcttccaaagttctggatttgaaagagctaagtgtgcacggggcttggctccgtgcagcttccactcgtggtcccgtggtatcaggagggcagtcgggacaagcccaacccctttccgtaacacagccaagtgttggaaagcctgccttcttactgtgttcttcctctcatgtggatgacaccagcaccttcattgtttcctacagggcctgctttaagtattcattaaatatttatgggacacctaccagggctaggcctgtgctatgcacacacaccagtgcccagggccctgatgtcccagtgggtgaggagctggtccctgagcattctctatgaacatgctcttcgtggcttcttgcccttagaagacaggatgtggactggacacagtgactagggtgtggtctgaccaccagagacacctaccttgtggtagcttctgctgcaccctgagaaaccatctggattaagtccagcactgttaaaaattatgattcaaaatgaacaagctgccctactgcttattttgaaaataatgttcaacctattatctgtttactttactggtgactggggggctctcagtacccaaaacacagttaaaatctatcaaagtagcagagaggaaaacagactcctcaaagatcagctgtgcaattaatccatggagagcctttctatcagaaaaatgaaattagattcctatattattccatatacaaaatcaaactgagtataacaatttaacaataaggaagaacaacccagtctttatgttcttaagtgggaatagcttctttaaaaaattcaaaataaaagcacaaaaatattgaaagttaaaaactttcttcttacaaaagaactcacacatagacaaagttaaagatagaaaactctttgaagatgtttgcagcatttgtgacaaaggactgatttccagaatttataaagaccatcaacaaaaagacagtaacccagtggaaatataaacaaagggtatgagctggcaattcgcaaatgggaaaaccaaaatgtccaagtaaatatttgaacagatacccagcctcaccagtaacaggaaaatgcagatgaaaatattccatgcattgcgtgggcaaaacgtttgaaatgtctgaaagcatcaaggagtgccccctctgttaacagaactcacaacagagggtaattggcagtaccaactggaaatgcgcgtatgtcacgacacggctccatgcctacatgcacaactgccagacacatgcagcaacgttcaacagcccagatgaggaggtaatgcaggcgctcatccaaaggggtacagataagcaaaatcagtgacacctgaaggagaaaagatggcttgcagaaaaacatgtacagtataattccattgatgagacttaaacacacaaagccattctatgcaccgtttatacacattgtttatgcatacattgcttatatgtaaagacgtggataagaaggtttgcacacggaattcaagccagtggatggcgttggtgggaaaggaaggggtggtgggtgccactgagagctctacaaagggaacgtcagctttatcttaacatgatctgaggcacatggtctaaatgtgattctggctcgccagggactcaaatgttatatctaagttttgagtgttgaatgtcaaatcattctctgcactttcctatatttaatttcctgccacatcgaaaaacggaaagcacaaaaattaaataaatattaaaccggcactcaagtggataatttaacagcctctaattacagaccaacggattgaattaggatcattagagccccggtgtcctttagtactgtgctgagggatcacccactgcttatgtgtaccctaagtatgcaagccacgagcagtcatacccaatgggtggctcttcaccagccctccagggccccgccttcaagggccaagagtgaggttaacggaagggacagaaaccccagaaaattgctctcctgggagttccatctgggtagccccgtttccagcattcttctgctctcaccgtaccagccctgacagctgcctcaagaaaggccaggccgggcgcagtggctcgcacctgtaatcccagcactttaagaggccgaggaaggcggatcacctgaggtcgggagttcaagaccaccccggccaacatagtgaaacccccgtctctactaaaaatacaaaaattagcatggcatggtggcgggcgcctgtaatcccagctactcagaaggctgaggcaggagaatcgcttgaatttgagaggcggctgttgcagtgagccaagctgagatcacaccactgcactccagcctgggtaacagagcgagactccatctcaaaaacaaaaaacaaaacaaaaaaagacaggccaacagccctgggctgagtaccattaacactgaaataaatagggccccatcactaatgctctgcacagattgtgtgcacagggcttttcaaatgtctgtccacgcacaggagtgaacaaaggcagctcaagaagaaatctcttcaagaagaaatgttgaattctctgatttctcacgaaaacatttattgctgagggaacccttggtgtggtatcctctccggtgtgggtctcagagttgtgtcataagagagacacagacctatgattctagttaaaggagaaaatgcatttgcgtggcaaaatgcaaaaagtaatgctaacctgcaaccaaatccatgaggatttcccttctgcctcctcctgacacaaacacgaggagctgtggcagctctccctgcggtggccacgggaggggaggacggctctaagctgtactgcatcctaggtccttcatccgcctctcattcctgcagcatccttcccagcaacaccttcctcttctgtgcttctctccactgcacccaccaacatgccacactgcatactttttattactcataatgtctgctcaatgcatcatttcattaactcttagttccaagctagcagggatttttcattattttgttaacaggtgaatggagcactctgtgtcccgtccgtgcctgcaaaacactgagaagccagacacacaaacagaccccatagaacgggagcgttcccattatggaggcacaagttgctctgactaatggcgctgaaataacgcaaaatcatccacctaccagagagcagaattcttcccaagacatttgtcacagagctagaatactggtatgaaagcagctagcgcacttccccaaagacactctggtaacaaaagaggacaagaatggcctgctgcaacacatacacaaactagcacttatgtacttgatttctgcatatctctctagcaactggcccaagaccctggagccgaggccagctccgtggcccccaccagccagcattaaacttgcaaactgtcaccaaaacacggttcacaaaggaaacttcacagctcactctccttttgaggatgggctatgaaaactcacactgcgggacttcaaactcatggtgcccagcacaggccaggaccctggtgccattcccccaggaagggctggagaacactgccctcgtgaacatgcccacagaacgcccagcaaccaggccgaagaacaatcccaaacccaagcacacttccaatttcagcgactttagccacatcacggcttttaatgagtgtggaacatgaaagacacagttgggcaggtgcttgaggccacacacacttacacatcagcagaaagtgctggtccttggttgctataacaacagtgccacctaatctacaaagagcttggaggcctctccacaccccggggagctaccgccgtctcttgtaaccctttggtatattgagacatgcacacactgacacgggcattttaggacatttttatgcccctggcggcgccatgcatcctgcgagagggattctctgccttctctttaacttttcacccgtagaacgttaacaaaccaggcccacggcagacagggctttggctggtggtcagtgcacagcagacagggctttggctggtggtcagtgcacggcagacagggctttggctggtggtcagtgcacggcagacagggctttggcggtggtcagtgcacggcaccatctcccttagcagcagaaacacagagtgagacaatgagaggtctgaatattttcccttttaatccagcttctggcactttccgaagatctgtctttcctgtcaaccaccgagtgcagtgctggggccctgagccatcccacccgtgtctcaaattcataccctgagcacctgagtatcccctaggaagttctgtctcccatagacaggggtaaacacccacccacgctagtgtggtcactcccttccattccacacagcactctgcattcatgaaattccatccaccgacctggattttcctttttaaaaagtctctgaggacagccagccctgtggatgcagtggcctctgggggctggtggcagggtccctggctctccaactgggaggcaaaggcaccggcctcggccagcgtgtgcaggggttccccgtgcctctgggccatgctggcctcgccgcagacctgagacgcggccccgggcccggggagtcggaggggaatgggagcgttgctgcccgctgaggcctctgggggtaggctgggtcccgggggcctgcactcctttcaaaacacaggctctatggcgacagacttaagaaaaaacggtgctgggcctcagcccccagggactgcctcagaggagactgcgctgcagcagggcccaggctggagagccgcgcacccgtgcagcagggcccaccctgtgggccaggcccagacacccccgagggtcctcccgcgctgccccttcagacctctgcaacatctgcttgagggcaggccccaggagaggaggagatgacacctgggggcatgcaggcctgggcttggctctggatttaaagcggcactccacgtccctggcggcggtggggtcgcgagcctgcacctgactccagttgaagacactagagggagcaccctcagtactgggccctcccttcctaaagcttagggggcctgggccttccccggctctgggaatggagtctacctctgcctgcctttcctcatgggtgcactgggctgtatgagtcagctcaggctgcgtaacaaataacagaggctcgtggttggaacagcagacattcacttctcacggttctggaggctggaagtagagatgaggatgttggcagggttggcttctagggggaccttgctctttggctttggagacagtgtccttccccctgtcctcatgtggccctttctctgtgtgtgtctgtgtcctaatcggccttttttttttttttttttttgagagagagttttgcccttgttgcccaggctggagtgcagtggcgccatctcggctcactgcaacctctgcctcctgggttcaagcgattcccctgcctcagcctcctgagtagctgggatttcaggtgtgtgccaccatgcctggctaatttttgtatttttagtagaaatggggttttaccatgttggtcaagctggtctcgaactcctgacctcaggtgatccacctgccttggcctcccaaagtgttgggattccaggtgtgagccactgcacccggccctaatctcctcttatcataaagacaccagtcagattggacaagggcccaccttcaagaccattttaccttcatcacctctctaaggaccctccctcccaatacagtcccattctggggtcctgggcttagagttccaacatacatttgcgagggcacagttcagcctataataacaacagaaccccaaagcctgggtttccacccaatattcactcagagaacgagagggggtgacaacagtgcctgggcgctgcggcaaaaatgctgagagctggcagctccacgtgcagcactgttctatctacctcgggtgtgtgaggctgaggagactctcaggcctgccacaactccctagtgtgtcatggtttaaaaattatctaccgaaatgtggaggttagaatccatcgtctctacaactggtgactcaaaaaatagagactaatttggaaaagagctgtcaggcccaacagaatattaatgttgctgctgtggttgcccagtgaggacatgaggaacgaaacacagaacatcactcgctcacatctgagccagcggtgctgctgtgagtctctaagaagtatccgtgttgcagctactgagacacgctttttcctgcccgggtcaccttccgcctctacagatttctttagatggtcctttcagcaaagaagccagtggacagctgagtggccagtgccttgggacgcacacacccagctggagtatgcaggctctccccagagcaggcaaggccatgtgataagaacaacaccgagctttcctctgagctcctgcacccctgcacctaccagtcatgtgactggatccaaactcacctgttgaggctaatttcccatttcagtatctgggataaggacacaggaaaactcagcgtgtgttttcctgttctcacacagtcaacccaacactctgacaccatatgttggagacctatcaaagtgtttatcctactctgtactctcaggcaataccacatttcacctgcagtctccacagtgcctggggatttcttcccagcagcaaccgatcagttctgcacagacaccagcaagatgtcctttaattcaattcgaattctgacactaccgacctggagatagcctcagattccacaagttgagggctcagtcccagaaggctacccctcacttcagatgccagtcgtaagccccaggctgtagcctgtgcttttaaccaactggctataaataggggttcctattgtcttcaactaatttgcttcaagttccctccttgtcttccactaatttcaactaaataggggttcctattgaaggggttccttcaactaaataggggttcctattgtcttcaactaatttgcctcaagttccctccttgtcttcaactaatttgctagagcagctcatagaacccagagaaccacattattaaggtttgctggtttgctgtaaaggatattacaggacacagatgggcagccaaatggagatggacatggggtgaagcatggggaagggtgtggagcttccgtgccctctgggcagcacgaccctgcggaatcctccggctgttcagtaatccgaagctccccagccccagtccttttgaattgttatggaggctccattacatagacgggctttatcaaatcattggccattggtgataagcttgaccgtcagcccctctcctcttcctgggggttgggggtggggatgaaagtctcaaccctctaatcctgcctgtggtctctggggtgaccagcccccatcctgaagctactcaggggccctcagccaccagtcctcccattcgtgtacaaaggacactcatcacttcaccgattccaaggggttcaggaaatgggaagaaagagcacatatatgtattttggtatcgcagatactgcctgcctcaaggattgtcaggagcactcaaccataatggaagaatggcccagttggaagacaccttagaggctatttcaaacttttgcacaccgacaatgttctacaacatccttcacaaatgcacatcgcatgtcttagtgacacaagcccgactcacagatttccagctttgtgcagctatgtgtggccgctcctcctcctcctcccaaagcttccttccccctttccaccacacagactaaggcatgaggctgggcagggggaagggggatactgagtgaggaaaacagagagggcggtggaggtggccacacagcatagctggtgtgctctttacagcaaggcttcagagcagcgctggtgtgtgcgtggatgctgaggatgaactcaggtccaagctgcctgactgtactcccatgggtacgcctagctggggtgcttcctttccaatgcaaacgacctctgcaggagacaggatggcacaggggcctcctcctgaagctcttacagcagattctcgacctctgcagctgtgagaaggcagcggctgtgtacggacacagagcagacacaggcactgtgcagaggggtgtgtgcttgacattctgccctgagttgcccatgccagtgaatgtgccaacggtccctgtagatctgcaggagcctggaaatgtctcatttgtcccgagggcaaatgctggacagggggtggtgaccagggtgaacgagacttatcctgtcacttttgtatagactctgtaactttagaaccatgcgaagagattacttctgaaaaatggaaattagcagcaaccgtagaggaagctggtcagaggagtgtggcacgtgctgtcttcaggagggcgggatgagggcagcccgggagggagtgcgggccaggcttccggctccatgctcccactgccagcgccaccacctccccaggcaggagaaacagctaaatcctgaaaactaacaagtaatgggtgtttctgcggtgtcttccaccggcagaaactccaccgagtgcctcagcgaaatgactccatctgatcctggccacaggctagtgagggggaactgcgccgggaaagatgccggtgcggggctggaggatgctgggcagagggggcagatcagcctccatgggggccccacctcctcgggccccccatccccttgggcccccacctcctcaggcccccacctcctcgggcccccatttcctcaggcccccatttccctgggcccccacctcctcaggcccccatccccttgggcccccacctcctcaggcccccatctcctcggtcccccatttcctcaggcccccacctcctcaggcccccatctcctcaggcccccatctcctcaggcccccatctcctcgggcccccatccccttgggcccccatttcctcaggcccccatctctcaggcccccatctcctcggtcccccatttcctcaggcccccacctcctcaggcccccatctcctcgggcccccatccccttgggcccccatttcctcaggcccccatctcctcaggcccccatctcctcggtcccccatttcctcaggcccccacctcctcaggcccccatctcctcgggcccccatccccttgggcccccatttcctcaggcccccacctcctcaggcccccatctcctcggtcccccatttcctcaggcccccacctcctcaggcccccacctcctcaggcccccatctcctcaggcccccacctcctcaggcccccatcttctcgggcccccatcttctcgggcccccatttcctcaggcccccatctcctcggtcccccatttcctcaggcccccacctcctcaggcccccacctcctcaggcccccatttcctcaggcccccatctcctcaggcccccacctcctcaggcccccatctcctcaggcccccatctcctcaggcccccatcttctcgggcccccatcttctcgggcccccatttcctcaggcccccatcttctcgggcccccatttcctcaggcccccacctcctcaggcccccacctcctcaggcccccatctcctcaggcccccacctcctcaggcccccatcttctcgggcccccatcttctcgggcccccatttcctcaggcccccatcttctcgggcccccatttcctcaggcccccatctcctcgggcccccatttcctcaggcccccacctcctcaggcccccatctcctcgggcccccatttcctcagacccccacctcctcaggcccccatccccttgagcccccacctcctcaggcccccatctcctcggtcccccatttcctcaggcccccacctcctcaggccccccatccccttgggcccctcttcctcaggcccccatctcctcaggcccccatttcctcaggtccccatctccatcctccttaatgtctgcactgcctggctgggagctgcagcgggagcctggcctctcctcctcctcctcctcccaaagcttccttccccctttccaccacacagactaaggcaggaggctgggcaaggggaagggggatactgagtgaggaaaacagagagggcggtggaggtggccacacagtcagcatcggaagcagagctggcatgtcccttctgagtccagcccggcttgagtcagcggggaggggcagggaggagggggccttcctgggagaaggcaggggccgcaccaagtgcccctgaggtgcccatgccggagagaagttggcttcctggagccccactctgtgctactgtgaagggcggttccatccgcctaggttttgttagttctgtgagccatacaggattagcgtgccctgcagtgctgcagagacatcgggcgtgctcccctcctgtgtcctcagcttctcccctgggggggtgctcaccagcccagggccccaccccaaccctagaggtccctgggattccctgagttctcaccagccttggaggccccgagtcaccccacgcagtgcacgcacatctgtgacacactcctcccacacagtctccctcagcccctcttgaccctcctcctcctcagacacacgcctttccggggcctgtacttgtcaatccccagacatccctggctgcttcctacatgcccaggctctgcgcttgctggcccaggaactgccctccgtgcctcttctgactctgtcacaacgggggtttctgcatctgtgctgtcttcccttctactgtggctgaggaccgcaggtgccacccgagcccgagctccttgagcatcccttgtgcctagaacatgccaggcacgcagcacagatgggtgtcattggtctgggacattgccacggaagtctccagccctcatgcaccagaaagagaagagtgacaaggatcatactgaggaggtcaggaactctagctgagaattggtctaaagcaatggaaatgggaaattctgtaaatccaagctctgctccttggaatcatttagaaactggccaagggctaagacatccctcttgctgcgtagactgtgatcatattcaggaggaaaagcacaactctctgaggggacaaattctatttgcctaaacagaggtgaggctgctgacactctagaaagtgtgaagtgtgcttttgtgaccgaagctggcctctgcatcccctaactcagcacctcacaaagtttataaccctcacgcagtgcccccgagctgcaggtgacggcaggcctccaggttcagcggtgaaatagcggagcagtaagatcttacagcattacttccccaagtcagccggaagttttgccagccccgtgctcctccctgaaacctcaaaaagcctgcttccaagccgcctgcttgttcttcccaaggtggaggcaagaccagcgccctctggccaggtgcgttcaggaaggggcagagattacacaggaattcagatgagttccagggacggcagctgccagggtcccgtcaaacgcacagtcacaggagggcttcccctgagttggccctgagtcagccagctgggctgtggtctgctctgcagcaggaggcagctgagcagagcctgtaacccctcaggggaggcaaagctgcaccgcagggcgtggaggaggtgcaggccggccagcccaaggcagataacagatggcgacaggggcttgaggcttggcttctctgctggcctaggtgtctggaacggctgggccgccactggagccgtggaaagaggggtctaagtgtctgagcttggaatcaaggtattcccaaattttctgctcgaagccccacaagtttccattttccaccacagccagttggatcaaactttgcaccattcgcatcctagtgaagtccaatagtcagccgatttggggattctatgcaaagccaaacagtggcacagactctaggaaatctacagaatgagcagaacatgtcttcatgacgattcaaggtcaggccctgtggaccaaggacagcatggagcacagaggccagactccgtggagcacagaagccagacgctgtggaacacagaggccagactccatggagcacagaggccagactccgtggagcacagaagccagactccttggagaaaggggccccagaagacaaaggggccagcacaggccagccaaggagtacctgagacctcaaaggcgacaccaggtccatttgtacctgggtattcaatgtctcatgtgcatttgttagaaattagataaaatcaatgcttattattttaaataaagacatcgtttctaactattttagtcattaataacctgtgatcttccagatgggccggcctagccaatgggcggtatagccacaacccaggtcctctgtgagtatgatgaagacatcacacagagtgaacagcctctgaaacgtagggctgtgaagcgcgtccacagtcaccgcagagcaagaccagagtacacatcctttaccaacctcagcttcacattcaacagcgagcggacacactgaagtctagagaggcaatttagaatgaatggaaagagaaaccttaagagacagaaaggcagagagagatttttcaaaatcttattttataattagtaaaaatataggaatacagtcacttcaaaagctgacattagctaagaacattaatgggttattaaatatttaatttaattcagagatgatagacccataatgatgattaaggttattatagaaaaggatgattcttggtgttagagatcatttactcaaacccttgtattttaaaagaaagaaagactgagactaacagagttaattgatttctcccaaggaaaagcacggatcacaacctggttctcccacctgcggtccccacaccattttatgtggttgttagcctctccccctgactctccccatagttttgtgcttgttgttgctggtttcttggtaaaatctgcatcaagtagatggatactcttggggtaatggtggcccactccctaaccactgtgttaagccttgtatactctgctgagtaggtaaatatttttgtcccctaactctgcacctggatttatttgctgtgaaacgcagggcccattcctaccgactataagcaatttattctgtgggtttagtcactgcagagggcagaaacaagataccactccctttatggggcattaaaaacaaactcctctttgctggtgaccctgtttctgtaggaagtgtgtggtttacctagagcaaaggggctggctgtcctgccagacttaagccagatgtagggctccatctatcttgttcatggtttcaccccagtccccagctggtataaccggagcacccagtaaagaagaatctacgcaagggaagaacagtccccctcaggctgaacaaggagacgccacctctgcttatacagcagcactcaactgactttctctgtccattcttcactaaactccttaaaaataaaattttagttataacttcagaaaattaacctctgtaaagaatcaataatatactttaaaacatgtgtaatgctgttggaatttttttcttgtcttatgaacacaaaatgtcctatatttatataaaaatcactgtgttgacctttctacatgttcttccacagctatctattaatactatgacatcatattgcaaaaacaaacacacacagcaactcggatgtgtttgataataaaatcacacagcagtttaaaaattcatccacagggacataaagttaactgttgttattatgaaagtttgtcacctccctacaaacacatcttgactgttatttagattgtgttaatgtgtggtgttattataataaagcccttattaccacacttattgtggttgttaaacagtcattagcaaccatgaaactgggaaaatacactgagctgcgttgcccatgagctatcacggttaataatgaagaaaacagatcaagagctctgggatcctctacaagaagatgcccactttcccgaaatttcaagagagacgactgtcagaaacgtactaacccaacacaagcatgatgaggaacccaaattctggaaagtgcctttggccatgcttgaacttgatctgtaatgctctcctgtgccgtccgtcttcccgtgagaatccagccccgagccccagccacacaagacctcagtctccctgaggcccgaggtgcatgcagtgatgactgcctaggaccgcctcagtgcctggaacggtttctcaggcacaattctcacctatttttgcatttcccacatcatgtatgttggaagaatcttgaatacacaaaagctaccagttttaaaaacaactgacagtgttttaaaacttaggctctattattattcaggtgtggcagggcaacaggtcaggagacaactgtcagcgaaaagagagtttgttactcacagatcccaagagagggggccaagccctggggaccactcagggatgcactgagcctgtctggaggcagaggggtgcaggaacgtgtgggcaggggcctttcacgtggcttccagggaaggaacaggtgagccagggtgagcctgcatgggactggttggtaagggcagttcccgtgggccctgctgcacagggggttgccctcgctggctggtactgggccctgggaggattagggcaggaggatgtggcccagagcgtgagagtccataaaggaggtggtgggggtgggctctggtttgcatttgaaaagtgcactcctgggtgagttgcctgctgtgtctgggaattagaaaccctgggggagcagcctctccagggccagcaagcctccccctgctccccaccaatgtcaaagcatcagatgcggaaaatgacaaggcctggttagtgtagacaggtagaggtccctttcccagtcctcaggctggtgtgctgcaccctcccaatgccatgtttgaccattgtggtctcagggaagggctctgagatgggtgcccagggcggcgggttcaggccctgccctgtcgctcactcgtcacagggtgaacttgggtcaggaatctcaactctcggcctcagcctcctcatgtgtgcaatgaaggggttgggctctgtgatttcaatgaccccttccagcttccagattccacgagcccctcctcgtaacctggaacacagaaaatctataatcctgtgcttgtcaaggagcccagacccagggccactgaattccaacaaatgtatgattcctcagccaaagccgtgaagggtggcttggaggtttgcatccacgcatacttctaggtggcctcagatggcccctggggtaaaggcagatcttccaagggcagcttgctggtctctgcagtgtggattcccagtaggagtgctttctctgctttccgttttagccttaccgccccagcctacaaccccgggcatggcaaaaaccttatgaagagatgcattgggcctcctagatgcattctgttcagggtgttcactcctttatacggtgaactctccaggagaaccagcaggagatgtttcttacagggctcggaacagaaagagatgtgtttacctacacaactggggtttatttatttatttatttattttgcttgttttgtttttatgtttccagtctgccctgctgcgctccactccttgagaatccagcaatctcagaatcacacccaggcccaccttccgcagggctgggggtcctttcgacacgcaccatggctgctgcgctccggcccagcttcctacctcctcctttccttcacctaaacaaacgcacttatggattagcttagccttgtatggaatataggtaagtttactgacatctttcggacgtaagacggggtgtcggtaaggaaatacccccactgatgtgactttatttaaatcagagcaaacaactgcatgagaagctgatgtcaagatgtaacggactcagggctgagctgggtaaggagctggaattcacacttagagacctgtctgtgcttgtcacgtgtggataagccacttgttttctttatgctcagttttcttaattccaaaagttgaagtaaacaactttcattcacattatataattatttaaaataatattatttcaggagtaatttcaaaataaaatataaatattccttaaaattatattctgtggccgaggcgggtggatcatgaggtcaggagatggagaccatcctggctaacacggtgaaaccctgtctctactaaaaatacaaaaaattagccaggcgtggtggcaggagcctgtagtcccagctactcgggagggtgaggcaggagaatggcgtgaacccaggaggcagagcttgcagtgagccgagatcgcaccactgcactccagcctgggcaacagagcgagactccgtctcaaaaaaaaaccaaaaacaaaatgtgcacacagttggaaagtcacagattttctttcaaaataatgtcatacccatgggtctgtcagtgatttctagaacactgtatttcatattttttctttttaaaaagaattacatgagttacacttaacagcaatttctcaacagattgtaggagcaattagcatgacctggtttggatcctaatctgatgcactctgattacatatgattataaacacgtttgggttaactcacttaaaaatgggcaatctcggctgggtgtggcggctcacacctgtaatcccacctctttgggaggccaaggtgggtggatcacctgaggtcaggagttcgagaccaacctgaccaacatggagaaaccccatctctactaaaatacaaaattagccaggcatggtggcgcatgcctgtaatcccagctacttagggggctgaggcaggagaactgcttgaacccgggaggcggaggttgtggtgagccgagatggcgccattgcactccagcctaggcaacaacagcgaaactccgtctcaaaaaataaaataaaataaaaataaatagtaaaataaaatgggcaacctcaagggtgggaggaatgaggagtgtttaatgggaacagagcttcagtttgggatgatgaaaacgtcgcggagatggcggtggtggtggctgcccaatgtgaatatacttaatgccgctgaactgtgcacttaaaaatggttaaaactgaaaaatcttacgcacatttcaccatcacataaaaaaaagcagaaacaattttttaaagggcaaactgctagctcttgaagagttggttctcttcacccaaaactttaccttttagtaacagtaaaaataaacgtcagctttgtcatattttctcccctttgcttctgcacttgcagaaaaattacggacacccttcccctcagttgtgaaaatacacttgggaacagaaacattaagttttcttgggctcaaacacaccctcaaacacaagataaattaaaaacaaggcaaacttcagccagacatgaggacctgctcttggcaccgctccgagacctgtgttcatgatctgtgagattccactccgcccagaaaacagcttgcccctggccgcccaagctctgtcacacccgtgatttcccagcagtaaataaaaactgccaagctccctgggacccccatttcctgcgagccctcccttacctttctgaggaacagtctctgcagcttcttgtgtggcagcctgatcatcatgatgcactccccaggtcccgggggccgggctccccttgccgtccagccattctgccagggcagccgccactccttttatcaccttgtgggctgctgcgcccgtcctcgtcaccaggcagccaccccgcacacctcctcttccctcccctcacccctctccaggcagccacagattcccaagccgggagtcctgcccctcacaggcaccagctgtgagttgaaaaaactctggctgcagacaaaacccccgctttgcaaactcagaagcaaaggagagaagctgagaaaacctcagccccgaggctggccttctcctctgatgagaatgcgaagttactcatgctgctccgaatcccagcaggctggaacacaacatctggcagaagccggcaaagcagaagcgtcacttagaggcaatcaaatgtcagaaaccatcaaagacactctgaggggcaggcctgaggtcctcctcaacgcacacctgcccccacttgcccacagccaggctggcaacgtgccttagcagtgcatgaaaagacacttcggtccttctctgtgtcatttaaactgaaaggaggaggcaggcgtaggaggaaggtgaatgaaaatggttgcttatttctttaggtggcgctgggtcagtgaatgcacaccaagggtgcgaggatgtcatcaccctgtattacccctccagatgatgcctccgccccagagacacaggcacgtgcacatgcatgcacgttctctctacaagcttttcccgggctaactcggaatatgtcctctctggctaacataaacatttgctttgttttcctgatcaaaactgaattcccatgtttccagaacatcagcccctttcttgctttcacttgccatggagccctgccttggttctgccagaagcgtccagggctccgtgtgattggcagctgctgagtacaggcggcaggttcagagtcagacccaggacactggcggagtttcctttgtttactggtatagcttcttgttaatacataaatagctttctcctctgaaaacctacagatgcaacagaagagacctaccaactgacaatcgccttcgaggtgacagacaatagaggccacggctaaggatgcaggtgtggaaataaacagatataaaaacacaggacttgaaaagaaggaagcaaaggcaaagaggaaatttaagactgaaatggacagaaatgaccttgatttagggtagtgcattgctaaaagacggggccctgtccatcccttccttactccaagacattgagataaagaatatttccttcccaatcagacagaaatagttgaagtgcaatcgtcctttctccagtggttgctatttcaggaaatgggttctaccaaaacaacttttcacccatttcgtggcttccagagcacacatggcgtatgttctttcccttgaatgcagagctgattaaaactcatttatccaggtcaatgttgcattcgtgtgtgtgtgtgtgtgcacatgtgtgtgcctgtgtgtgcaggtctgcgtctacacagatacatacatacttcaggtaaataacaactgaaaggagctttggtcagtccttcagagggactttctaagggatcatttttattaaccctactttccactatgggaactttattaagaacctataatgtaacatttttagaaacacatgccatacatctgccattatatacacatttttttctattctggagccgttggcaaatattacttctaagcagaacggtcacacttctgagctgttactttgagaatagagcacggtttgttcacaggccaagttatggcaacagaagaaaatgcctctgtcttccaaaatttctcaattaccttttgctacttttgctggcccaaaataataacacggggagattaatagaaaataaggctctttctagtctcacgaaatttcgtctctgtgattttatgtgagtctcagcactgctggtgtgtttcagccttgacttctctctgtgaaatcatcaggagctttaaaacaatcccagttctatttcttttctccaaaatgaatccacatccacatttcacctctttgaaaatgctggatcttaaaatatatgtgcagcctttcacagaaataggcactcctgcttcctggaaacacactgctggcgtcttctcataccgtctaccgctggctgcagcctcagctcctgcggaagacacagccgcagccgagtccgtatcctcgcccagcggtcaacgcagcgccgttcccaccattgtacagagaggtttgtgcttggtgaagccctactgcaggggatttctgagtgtcgaaggaggacaatataaaatattttcctgaaaacttaactctgtggtccttcacaaatactttgttttaattttaaaatatgtagtattcaggcttgattgagatttagaaatttttactaaatttttgtttgagggtgtggtgttggggccctggtattgtttcaaatacacaggaataaaaacggaaggtttcttttggctatctgtaacctattcattcggttggcaaagatgcgtagctcatgtagggcaatgttcccagcttaggcaaatcaggggcacctggggaatggcgatttggagagaggaaggtgggctcattctggtgaacaaatatttccttaggtaattttgcacacagagtaaaagtgaaaggcttcttaagaaattgtgtttacaattgtataaacatcttctttcgaggatatattgagctggtctaatctccaaaggaaaaatacccaagtcaagcaaagcaattgaactacatcgaagatgaactcaccaaagcgatctactgaatgtcaaagtgataagatcatcgcacagagtatgtgggcaccgcccccacccccatcgcggtctggtttgagactgtgaggactccaggttgattctatcgctcctggcaacaggaaactagcataggttagatcagtgcaagccacggaaagcttgaaaatggctcggccaaaaatgctcatctttcctgcaccacatattttgctggaatcgcttgaaatagcctgctcactggcaatccctcttcccatttccaacctgatggcaacgtgcatggatactgagttggggaaagaagaatcggatgggggaaatggaggcacaaagggtccgaataatcctcacctacagtcatttgggttttggtatctgtatttacagttatcctaaatacaattcaatccaaacttccataagaattaaaaggaaattttccaggacttggtacttttgaaagtgcattagcaaaataaatcaggcctttggtctctggctaaatggtggtcatgtgagagctagtgggtttgcaatggaaacccttcattcttaatggcatttaattgcaggtggatgtgagtttgcgaactgaatgttgtcgtggtgatgatggcaagaaattgccttttattcatttctgagaccgagtcttgctctgttgcccaggctggagtgcagtggtgcgatctcggctcactgcaacctccgcctcccgggttcaagcaattgttgtattttagcctcttaagtagccaccgcacccggctaaattttgtattttttgtagagacaggatttcaccatgttgcccgggctggtctcgaactcctgacctcaagtgatctgcccgcctcagcctcccaaagtgctgggattacaggcatgagccaccacacctggctgccttttattttatgccatggggaaatcatcataacaatcttggcttactcatctaccaaatacatttttaaagacattattttgaaaacatctctggctaattggtgaaaagcagctattactgtgtattggctatggctttaaaagcattgctattgttgacaggtgagcatccaccttccagcagcagaaccaaaacgctcacacaattcagcccaaagaataaacaaccacgacacagcggaaagcatctgtttcgtgtttccattagaccatcagcgtctcagcctggaagcaatattttgtgtcttcctctgaaaaacctagtagttcacttccatatctttggacccatagagaatcagacggatgattttagcctgtgttgaagacatcactgggagtgagttgtacctttccccttcctaggccccggggagataggaaggtgggaccgcacggctgtgtcctccccattgggaatggagtggaagggaagtgtctcctcgcatttgaggcagcgttgaaggcgcaagttatcccctgcaccccagtctcatggcgagaacaaagagcccagggagggtaaagctccagatggggcagcctcgtctcccagccccctggacctcccagaaagtggccgaggataaccctgcctgtgacctcatggaaaagaagccttgcagacaggagtgagaagcaggctctatcacgtggaggccctggtgtcaccacagaggtacatggtctgtcccacctggaccaagacaagtggcagaaaccttaggtactggtttcaccaaaaggaaactgaggcccaaagaggccacacatcccaggcactaggacagtggtgtccctgcgtcctcccctccctcagtctccccacattttaccacattctccctcagacgcaaaaccgaatcatggcctctctttaccgctcagccatgtcagctcaaccttagcaccgttcaaagcaattggtatgcatgtgtgtgttcatgcagtgtgcgtgtgtgtgtttgtatgtctatgcgcatatgtgtgtgtgtgtgcatgttaaacggaggacggaatatgaagttcaaattcccccacggcacctggcgtagtccctggcacatggagtgtgtaaagtcatgttcttaagtgaaagtatcttgggaaactggcctcattttcccttacgcagctgatctcgaatcacacaggatctcgcactgggctgtaagccggcaccagggttacaacctgctgtgcaccacggtccctgagagactcagcctcacatgaaagtcctgtttgctcccagttcacaggtaaataaatcaacagctccacggagaaagaatagcaccttcccatcctgtccactcccaggaaacgaccttcacttctgccccgacttctgggagccaacaaggaaagcggagcaagccatgaccctgagccttgcaccacgagatttgaggcctgtgggcaccgaggctactgcagagcacaggtggaaacacaggtacataggtgactctccgtaggtcaaagaaacggtttcacatgcttctgtgataacagctgcaagcatgaataaagttcagtttcctttggaaggcattgatggtttcagcagctctcctcaatgcgtggatagcaaaaatatagctactacaaggtggggtctgtgatttattgttattacatttccaacagagtcttaagctaaaaatatttgggacccagtaactgagaagtcctagcagtagtatcaggatcacagaaggaaccacatttcctgccttacaggtttggtttccagacttagctgaagcctgttagatggcattcgcttagcatggaaaaagcaaagccaagaataattttaaattcttttggagtcattaaagggttacattaagaaaatggaaaaatattatttccacaaaataaactgcaagagtaaattatctttgatttcagcaaatgtctgcatcatagaatcacagttaagaccctaaagccacatggctcggttcaaatccatgactcccctacttggctgtgtcacctggtacaacttaattgcctccatgctcttatctgtaaaatgggagagagcggcaatgagagtgactacttcatctggttgttgagggtcaaatgagttcacattgcaaggtgcttagaacatactgagtattctataacgatttaccaaagaaaagcaaagcaaaaacaggagcaaggaagggaaccttggatttccttgggggaacaaccttggaaaccaaaagttaattaagaaagagctgtcaatttctttacctcctccctgtacagataagagcattgagaaaaggcgtttcgtaagtagtgaggcaccacacggatgaacggcgacgaccttgttagttcgctgttacagatcaagtcccaagggccccatgataataaccaactgcaaacgatcccagcaaaaccagagctgtgcctgtccgtgtacctcgagaaagaggggtgcacccagcagtcctttaaagattgttttcagatccatgacggcacggccggccttgtctatgtccgtcaccaaatgctgaattgtgtggcagacacaacactgtccatgacctgctgtaaagcagcttctgttagggttcttgttgttcggctagaaagaatgcgaagtgtttggggagttgtgagcgtgaggaattgccatgtgcggggcttctgagtgccctgtgccttgcatcgctgccggctctgaggaccacgcggtgctgggactccactcccactggggagggcgtgagtgagagggtgagagaaatgaggctgagccccagctcagagctgggaagacccctgggatcgcccggcacagtgtggtcagggtcatttaaggccagcgacattttagtgatgggcagagggaaggacaccagggggcgcgtgaaaaggaagactgtgaggcgggaggaagagtgggaggctctgcccagggtggccgaggagcagggtgcttcctaaaggaaggtgtcgagaacggcaagctctgaggaggtgctggaacgcggggatcaggtctaacaacacggggcccgcgcttccctcctcacaaggcagctcaatgaagctgaaggagtgaaatccagccacagtgagaaggcgggcaggggtggttgctggaggaggccatgccgcaggcctagatggggaagcagagtggggcaaggagcagggggttgggaaggggtcagggtccctgtcactgaccacattgagtgtggctgcacttccccaggcacagccgggtgccctcactctgtgaaaaacaaaccacaaggagcctgcagccatgagcccgcaacccctgacaacgggaggaagacgcgccacagggactgggacagcggccaccgcggtgacacctacagccacgcaagcacctgcgtaaacacgtgctacagtcacatgttacgtatttcacacatttacacactacacaacgtgtgtgtgttcacacacatgtgtatcaacacacatatgcaggaacgacaaagcactttggcagccttgacgttatctctaccgagttctgtcctctcatcatatgtccacggaggtggcatgaccttcccaacaccaaacggccaatggggtgaccccgcctgggtctctcagctccagcctggggctttctcctccctgccagctccagggcaggtggcaggaggaacagccaccacgctgaacaaggaaaggacccagaagttaggccacatgaagagagccacagtcctggagtgagcctccacgtggccagccagcatgggtagtgtgtgcagcatctctggactcataaacagtgctcctgacgctggactccacaaagccaagtgccatgagaagctcccagatgtttccagggctgcaggtcagcaggtgcgtccagcacaccggccctcaagtagaggatgctccgggacgcgtggtgacgacccacggccacgagcacagccagccctccttagccatggcccccgcacctgctcccacctccaagatccctgctgcccgcttagtgtggggtgacataggttccttattgcatccgcagctcagggacgggcgcagtgtgctccaagacatagaggctcaataaatcctgcagtaataacaagaaaacgactttgtttaacttttcgtagattataaaggataaccatcattccctatagctcttattttctgagacctcgatgtagaaagtgctggcttaaagtggtgtagaaggtgtaagatgtggagctggcatttaaagaagagaattcaaagagcatcttacttttttgaaaggcgtggggctaagcatcacattttacatgcacagctgagcaatcgacttaaggtgttttaggcttcatctcctcatctgtaagatggcaatactcacagtaatataaagaaacagtgattatgaagaattggctggggcaatggcaggcactcagcgactaccagcttttctgaacaggggaagggaggttgagtatacactcccttcacgctgacacagtcctccagcctgttaggaacaaaacacttcccgctttctagttcactgaaggtcaatatcataatggctgtgattacgatatgagaaattctcagggtgaattacaaattccaaacaaaacattccctttgggtagcctgaggtgtgtaattatcatgatgacgtctttggggttgcattggtaagtggcagtgacttgtttgattaatggattgaatatttcttttcatgtcactgaatagaggataccttcaattggtgaaattgcctgagagacaacacttatccatgttactaaacccaagatatattgaataacttaaatctgtatcatatcatcacccagtgagtatagtgctatttaaaaattttttaggataagctgagccttaactttaggcctataacttcaattatatttaattttcaaatataattattgtaccagtaatatagatttctttggaaattattttaaaaatgaagaaaagaaaaaatacatataattgtacaacttaatgaaaagccttggtaatttttggatttgtgtgtatgtgtgttttcctttcaagctttttctaaaaatcttgcctgtttctgtgggagttaggaggtgggctatagctgaatatgataaaactttgatgtactgttttttcccctaaaattaatgatttttctccagctatcccaaaaagacatttataagtatggcctcaatcaaaggatttttctagctcaaattctaattctgactacagcactattttctgctgaagtgcaatgcacagattttgaaagcccacccagtgactcaagtaactacaggaatgaaacagaatttgtctcttcagcggttgtttggggctggaacgcagaagcacagaggttgcgaggtgctcctttttagctgctggtatttccttttgctgccacccctgttctggaagcttcccttggcaccctactcgccccacagtgtctggacccagctgcgtggccctgtgggcctaacgtgcctctcctccctcgcctttgtttacaagtccaaagaatgtgcctccccacccccgaaccctgctgcacccagaagtctgcaccaactcaccgccacgagagtgaatgaaggtcccttccttacctgggggctgccctagcaaagaggaagggctcagctacctgtgggaaaagccagctccaccatggaatttttgtctctgaaaacagactgaagaaccagacttttgtattttatcccctagactctgcccagtttttaatgtcgcctatcacctccccatgagcaacgccatcaaaaagcaaaatacaactgcgactaccgtctcacacgcttcagcttgcaaggcagaggcacggaacgatttgatgaaaaagacagaggaaaacagaaaaatcactcctctaaccaagaccacaaaggccgcgcggatcaatgtgctccagatcaatgcggtccagaggtgaaagcgtggttagaggaagacaaaaaggacagagaagccagctcgcgctcccttcaggatcctacttggaaaattaattttgtgactcagctgagggctgctgctgtcacccaggagcccttcagactgcgctccacttgccagcaagcctcaaagggacccaggaagggtgaacattcggccagaatgtgttgagcgtccacaatgttccaggcttagcccccgcactgcagctccctaagttgctttgcaaaggactgagtttgggtcacctcattattttatttgcatatcaggttacctgacaaaagaacatattgtttcccaaattattaagaactaaagacaatacctcctcaaacacacacacacacacacacacacacacacacacacacacaccctggtgtcaggcagccggccaccacagagtgtgtgcggggattgctaaccatggcagagcctgctctcactgtttgggtgcaaaccttgggggttttatttttccacgactgtggagtctgcctctgtgtccccacatgtaaaatcgctaccttggccaccactgcaccataacaagagtgctcacatttctgtccttccaataccaggaaatctgagaaacaattactttttctttgttcaagtcccacccaatcgacagatgatggatcaatgcagctctataaaacagggcatgtgtgttcacttcaaagccataagaaaagggaagaaagaggaggaaacccagagagggcctcagcgggcagcagtggccctggacaagctccccccgttctggttgaggttgggtatggacaaaagaaaacatcctccccttggaactggaacctcctttgtgtcttttctaaaagtgatttttttataaaggcaaataaataaagagtgaaatcatgatggagaaagaggacatacaattagctgtgaaactagaggcaccttgcaggacttattaggcaaaatccatgaaagacgctgaccgctgtgttagtgccacccacgcttctgggaccatcctggtgagcggcccaatgttccttagccaagcggcaggggcagctgcctctgcttcagaggctgagtctgtgttaggagtttcagcaggagactggtataacaatctgttgaacatcaacttttgtagagtcttttaaaaaatatgtacagagagaggtgagtagggagggagagagagaggaaaacaaaacaaaacaaaaccagaatgatcagcagagggagagttaaagccttcacttggcaatcactgctgccttcctaccttttcagacttctgggctgctcccgggtgacgctgtgtgagatctgatttgcttttttcatcctgaacctacggggttcccgcctatcaaattcaaggtgaatctggaaacactgccaggagtttaacctactccgggcctaaaggcagtggaggggattttgctggccctcagcccacagagaccctgtggccacatggctccgggggttctcccatgctttgaccctaggatgtgactggacacagggtcctggcagaaacagccgctttcctgggaacactttccagttccaactatggcaacttacggttaatgcctgtgccggcctggctgttgatttaggaaggaacgactctccaagggcacccacaccctaccctggccctgaactctgtgcagcacccaccagaccaatggctgtgccattggcccaatgttcactgctatgaccaagagaggagaaacacccagtattggaacgcatcatctttatttggagtgcccaggctaggtgtggattgggatgatacagataataataaaactttttcatttgccaagaaacacagttcatcacacatttggataaagccacgtcaagtttcgctaagaatcaccaattacagcttgactctttttttcttggacagattatggaacagactgacaagagattatgagaaaggaatagaagacggtgttcctccaactccagcagaccttgtttgctgagttgatttaagttaggatgtaatccaaactgggattcaggcatttgcttaaccccttaactgaaatagtcagaaccagcttgagattctgtgtgcccacccctcacctttgcatggcctccatcaaccatacagttcaaaacacaagttccacgtccaataaggaaacttaattcatgcaaaatgcgttcagacccagatagtagtaccacaagtatggaaaaagtaaaacagtggaattcaaatgtcaagcattgtgggcaatggaatgcagtagggacctctcttccaggatttgggaccacctaaaaccaggtgggactcagcctctcccatcagggacttgcaggccccagcgacggggctgagaaaaggcggccgcatccttgtgcagtgccctccctgggcagctccgagggccacccactgcccagcaagacccctgtggcagagctcatgctgttctcataagacctttttaaccttattatatttttgctttttagcttcaggaaagctgccagaaaatcaggagtatttttgtttcaaatgaactacagcgcagtttaacgtatcaatgtagatgaacataagctcaaccagaaaccaacttccaatgacccgtttggcacctacaaggagcaggcccatctagcctgctgtgaccgctgcagaggcgcggccccaaggatgatcaatcccatggtgtcacaaccacatgtggcgtgactaccgacttactacatttcacctgagtgttgcagcccaaagcattgaaaacagctattaaactatctttaaaaatgtcttattaataaaggtattaaaaccagatagatgcttgaaataggagaaatctacctccatctaaaattatctattttagtcctaattcctagaaaagctgttgctgagccacacgcactagagtctggaggctggtcggccaccagcctgcaaacctcgagggcagacacagccccaggcagcttcagcacccccacgtttgcctcgctgccatggctcccttctgccgctggtaatttcagcttattttgaaggcacgtcgtagttttaaaaggaatattggacataaagtgatgcagagattcagaatcaaactcaaatcataatgcatggcaagatgacatcctcagtttagcacgcaaggcagcccctgctgtacaaggacattactgcacaaagcactcggattccccacaggatgccaaaaaattcacattttcctgtggagtggtccagccttctaaaagctcttcgcaccttgccttgctggactccgggcaccgtgaaacaactcaataaattgaaaaagacttcatgtttaacttaaaaaaaaaatgtaactcacataagcatggaaaaaaacaaacccacaggaacgcttcttacctctacggatccagctacctttgtcttgcaggcagctgagtcacttttgccctgtgaaaatggaaacgaagaaagaattcctttaagtcacaggacgtatttacagtcagcaacttcattagcaagggcattactaccatactcaccaggcctgtgagctttttgtttctaaacattaatctccacataattttaagtaattggaggagtttctttcgcgttcaggaagccctttagtgaaagcctacagaagaaaggaacttgcgacttttgtgcaacttttaaaatttagccaaaggaagtgatggtgtcccatcaccaacctcaaagctcaacggaaagaaagtctctttcaagctccatatgcacagcatttatcttccaagccacgcatcagtgacgagcaggcaaatgctttcaggtgactctaaactctagtctatggaagaggctcattccagctattttaatctgtagatttcatcttcatctgtaatacgctcgcatacacctagttaaaattccaatcgtgcttggtccagggcttaaacccggaagcgcgtgtgtctaggaggcctttcttcttcccaagcctctttttggccagcatggtttggaggtgacctgaagattttactcagcaacgtggttttaggactgctgagagcagagacaacggctacccttactgcggcacgttcagtgatgcaggggccacatttccatttcctactttctcctttagccttttcctgccacatttctcttctgttctctgttccttggctcatacccactgaaatataagagatgaaggaagaagccagaattcaaatgaaatctcctttgcccctactgatgactgcggttcaagtgtcagaagacagagcgttggaatcaccatctaaatgaaatgaggctaacaggagatgccagcggcctctgctgcctcacatggccctcggttgtcacgagtgagcacagctttggggctggcttctcccgagtgtgccatgaggaaaggggtccagcgattcttccctgagagaaacccctgcactgcgggtgcccattctcgcctcagcctacacctcctctgtcctccaacacagctgatgagcggccggtttatcgaggtgagaatcatagctctgtttgttttatgttcccaactggacggtaattaataactggcaagaatacagttgctaatgctgactttaccacttgtttttgccatttatgtacctgtttgtattgtactgggcatgtatggtgagcctatgtggggtttctacccagcagcccttctcccctcctggcaagcactccctttctttctatgggacactagttccatggagtccaggtgggaatgaccccaccccccagcccccccaccactgggagaaaggccctagcagggctccctcagagctgtcagcccccttgtcctgggatggccagcctggcagatgacctaagtctggggtttgtgcttgctctgccttggaaatgtgcctgcctgagaatggagtcgagcaaggaggaagagaaattcagtgtcctgccgacagcttcggacgctgggattcagacccaccagaaaccatctctttcaatggtgtgagccaacaaattgccaattttaagaaggtttgattctgtttctataacttgaaaaagatggtgagacccggtggaacataaatgacgcttttacagaaaaatacctaatagcatgaaaatcccaaatgtgccgcaatgttgtgccttcgcctatcacctcattccactccatgacctactctcagggcaaccagcttttcaaaggaagtgccccacagatggcgctactaagcccggctgtcgggacacacctgagactgtgcatccagggtatgcggtgcttggggtccctcataaaaagacacattactaaatttttcatattgtcttgtttagaatcactgactgtctttcccttctcacttcctggactctcttctttgcaaacaacattaagaatgttgttaactcccctgaattaaacaggggaatctggaatgacttggacattaaatgaggattctccagccactctgcagccacgctatccctcccacctccaccccttctcttcctccaaactggcccccacacccatcctctctacaccatggtcagcctgctgtgcgggctccacgtctgggtcaaccctgtgtgggcagagaacaggggcagcttccagctccagaaggaaatcccagctcctctactactcctttccgatccaggacacgagaggagaggactccccttacggatcccatctcctcccctgaagcatctgtgactgtgcaggttggagaaggaggcagggaagggggtgaggagagggggaagaggggtcacaggaaagcccagtgtgccctaatgaggggctttccatcacaggggagtcagagcccccacaggaaatcctgactcctgaagcaatccacttttcttttctttcttttcgtttttttttgttttgttttgttttgttgtttttgaggtggagtctcgctgtgtcacccagggtggagtacagtagtgcagtcttggctcactgcaacctctgccccccaggttccagtgattctcctgcctcagcctcgtgagtagctgggattacaggcgcccaccaccacacccagctaatttttgtgtttttagcggagacagggtttcaccattggccaggctggtctggaactcctgacctcaggtgatctgcctgctttggcctcccgaaacactgggattacaggcgtgagccactgcacctggctgcaatctgctactgtccccttcctcgtctgtccatcctgttacatacctgtgaccacattatcgtcaaaatacgtttaacatgaatttattatcatcatggctagctccaccaggaagaaaaaaaaactaccgttgagatgacataaaacgctttgtgcaaatgatcgtcctccaggggtattccgtgaagaggacacttgtcatatagccaagcatgcttgcagaaaataaatggacgtggtcagacaaatatttttgtgtgtttcattgatttgaaataaactatcagaaatttctaaacaaatactcgccaaccttttggaaaaaaatatggattgaatctttttttttaagtctagaaagtgacccagtgttgtgggagaaatgtgaaaggcaggcaccatcgctttcacggcacttggggtcatagtctggatgaccaagattcatttgatcctcaggggtcttttatgattggactgcaagtaaagctgccagccaaattttataacacaaaaggtgttccgtgtgctcacagcacccctgcttaccagatgacagaatgtcttgaagattgtgcacgttcctcaaaagacacatttagacagtcatggtcaggcagttgatagactcgatatcagctatgaatttctcagtgaaattagtgcatgggattctagaaaattggacactttcaagtggtgctgtggctggagtggtgcagccgtctttacccagcgagcgtcccggcgttggttattctgggtctttgagaatgctgtgactgtccctgctgctgctgcacccatcccagcaccacgtggctaagctctcccaagatgctacggaccatggtagggagctcagcctcccaagcagccagccagggtttatttcctggcaccagaacttaggcaagtcattggactcctcagccccaatttccctgtttgtacaattgaggaagacagtcccttacacaggggtggtgggagaaagaaatgagctggcccatattgggctcccagcagacagcagccatcagtgaacatcagcatgatgacgatgtggggaaaattaaggcgttcccagattacagcagcataaaggaccccaaaacatctcgcccttctttgagaacgctggcatgtgtgcttcttgtctgtgacctctgaggagtcggatccccaggtgcttcaatagctctgagctgtcctttattttggatgagccccgtcttccagcttttagggttgggagggcagaggagaaacggcaggtggcactgcggatatttttacacaggataatgtgacctgcccagcctgcacctgcgctcagcatcatcagagttccgtttcttatacttaattaggctacacaaccaattttacgattttaccattttgaaatcacgtgggagttaccaaaatggttaatttaaaacggttttacccagactttggggggcagtcttgattcttaaatggctttgatggctttgataaacaccctgggcccttcctccaaaaaatacacactcattgaaagccccccccacccccggccccttcgcactatgcacagccctcaggagctccacctttggttttgggggagtctctaagtgcccaaaagtttccctcgcaaatttgcacgtctaccactagatggcagcagaggacacagcaagtgagaacactccgaggcgcgtgcagccaatgaaatcctggaaacttgttacattttgttataacaaacaaaatataggccttggttttctttaatcttactgatgtgctcctggaagaagaaaaatgctaatttacacagggtccacgttgtaggaaggctgaatttggtttccatgacccccgactctccctccgctggtgctcagctctccccacacctgccagctttatttggatttctgtcagttctgaagtatcagctacctgaggctgcagcatcagccaagaaaccgtctctttcagacgcttgctggcttcagggctgcagcccggggatcttctctagataaagcgcggtggaaacacacacagacacatgacgatgctgtcgacccacatgcctgagctctgggattccacggctggagctcggaactgcgaaggggcagagactgagcgcaggcaaaggcgcacagagaggactacacaacacaaaggataatgtcctcgcgatggaggaaccactgtggacagtcaggaagacagacacgcgtggagggccagaactggaagtgagggcgggcattgctggctttatctgatcactgggaagggtggttgtgaaagccactgagggtgtgtgcctctccccagccacagcggtgctggagaggaggctggggcgctcaccactctttcctctaccatccggctctgggggccaggtccatgcaaaaatacgtggagaaagtacagcttagaggacttctacttccagcaagacgccaggcagaaatgacagagaatgatctcgctacacccactagaagtggtggataaaacacaacaaaaaaggaggttcaacgaaaagctgagttgtaagaaggaaggattaacccacaggctccagaaatgaggaggactggaagagagagaatggagtccccgcactgactttgagaccgtcctgggggcattttccgtttctgtaatcttccaggttagatttcttgtttttgtgttttaattttttttatatcgaggtgaatttcacacaacaaaattgatcgttttaacatgaatgatgaggtggcgtttagtgcattcacactgacgtgtcaccaggtaattcccaacatctgcctcttccacgcccatgaagcagttgctccccactctgccctcccagtccctggcaaccagcaatccgtgccgtctctgtgggttcacctgctctgggcatttggtatagacagaaccgcacagcgtggggtcttctgggtctggcttcttttgctctgcatgatgtgctcgaggttcgtccatgttgcagggtgtgtcaacgcttccttccctttagtggctacataacatgccattgtttgtttacaccacagtttgtgcgtccattcatccattgatggacatgtgggctgtctcttatcttttggcgactgtgagttgtgctgctataaacaagtgtgtgcgtatttttgtttcagtacctgttttcaacaatcttgggtacatacctaggagggggtcagccgcagcctttcatgtgcttctccgccatttgtagttctcttttggagaaatgtctacttaagcccatcacccattttttcattgggctggtggtctttttgttgttcaagcttgggttttaatatgctggagatacagggaaggaggatggggcggctgtgaggtgaagagctggacctgaggttgctgcgggaggcctgagcagggagcgcaaagcctggacgaaagccccgaccagctgagaagaggacgggagacatcgaacttgtcctgggctcaggttaacaatacatggattttacgtcttctctgataattaaaaatgccaggcctgtgccttccatgagtttgggtgtgaattcataatgacaagggtggctcagggtgaagtttaatgtgacagctggtctggtgccaggaacatgcctaagtcacaaacccagaactccgctgaagggaccacctgaaactgagccacggggaaagcacagagagaggaagtggcctccgagtgcacgcacagccaggagccccagaacccaggcagcgccactctgcacgatgggcagaggacacacaaaaaggcaaaaatggagccaagaattccagagaacagatgaacaatattcaggagtattaaagaagtattgttaaaagttataaaatcataaagaacatagtaaaagaaataaatgtaaacaagttggaaagaataaattaaaactgctacggttcacagatagtataaatctctacagaatccaagagaatctacagagaatttattaatttgaataagagggtatggaaaggttatggatggaaaagtaatattcaaaagcagttttggcaatacagcagaaaataattttaaatgatagcatttgcaattgtgagagagagagaaaagagaagaaaaaaccttataagctataaaagagacatctaaaaaaatgtgtaatgtctttacagaaaagatgagtaactttattgaaagatataaaagaagactaaagtaaatcttaatacagtaaatatagcaatttttccaaagtcaatctgtaaatttaatttaataaaatcataatccaaaaaggacgattttttctgaatttaaaacaaagtgattttgaaggctgaaggacagccaacaccattttaaagacacagaagcaaagacaagccctggcagggagatatcggtgcttacgttagccttagaagaactcagagggtgccacgggcgcagcagagcctggagacctgcctgcctctgtgtggggctcacgaaagggcaaagctgttagagaacagcagggtgagatggcctctgcaacgactggcgccggccaactgactgatcaacctcataccatatatatcaatacattcaagatgcgttaaaggccagaatgtgaaaaaaccaaaccacaatgttcaaaaggatatccaggagatgatatggttgttttaacttgagctactaaagaattctttaaacaactcagaacgccatacattgttttacaaattgttttttaggctgggcatggtggctcacacctgtaatctcagcactttcggaggccgagatgggtggatcacctgaggtcaggagttcaagaccagcctggccaacacggcgaaaccccgtctctactaaaaatataaaaattagacggttgtggtggcacgcgcctatagtcccagctactcgggaggctgaggcaggagaatctcttgaacccaggaggcagaggttgcagtgagccaagatcatgccattgcactccagcccgggtgacaagagtgaaactctatcaaaaaaacaacaagattaacccattaactcatgtgttaataagatgcgtccactcctgtcagagagtgagctcctggctcctacaaacagcaccgtaagcgccacgctgcgtctggtgagagttggagaagcaaaaactctggcccgttgctattgactacactgatgctctgatacacccagcattcagctgctttggagagcagtttgtcgatagcagattaacttgaaaatgcgcaaatcttgtggcctgccgatttcacattgacgtgtctagacagggagtgtaactctggcgcacactgatggggagacaggtgcgagctttctcactggcactgcttcaaagatcaaaacattgaacgtaatctaacggttccttggtgggagagtggaaaagtaaactatggcatttttcctaccgtgatgttctctacggccctcaggatggtgcaacagagctctgtcatcagcaggggtcaatcccaaaatatcctaaggagttgtttttaaagtaagcttcaaaagcaaagagactgccttccgtccagtaaagatttaaagcacacctgtaatttatagatgctgagtctcatggactgaattgtatcctcaaaattcctgtgttgaagcccggcccgcacatgtggagggtgtgagtctggaaatgctcagggacccccgggcttcacaagatgactgagacattggaggaggggcctgggagcctgtgcttgtgaccccaacccttggctggtggaataggggagagcccagggctaagggagagaaagaaccagtaacccatgtgccggagccgctccggggcctcagtctagtcaggatccagatcacacagccgtgatcgcccacatcccgtccacagagcacttgctctgtgtccttaggtgagcggccagggtgtttcctttccatgagcagattcggctcaactcatcctcctctcaccccagactctcaccaggcagaagaggaactggatggctgactgcagaagggacccatgaagtgagggcggccaagagaaataacggcaaggctggggctagcgttgccgacggctgctggaaaaggactcaccaagtccctcagctcgctagagacaaccaatgctctcagtggcaaacactggggtggcagactgggaaggagatagtttttttgaactcatcccaaggataccaccatattttaaaaagtgccaagatgacagtgctcccccttttctatgggagatagggaaaggcctcctctgcttttcttcatggtgggaggccttgctaatttctcaggcaaggggatggctcaaagcaggagaagtgttccttggcaagcaatgagtagcgtcactgtgaccaatagcagcatagttctgggctgcatcgcgtaccccaaaatccatgccttgaagtccagccccagtgcctgggaatgtgtcctgatttgggaaagggccattgcagctgggcttagctgagaggcagtcacctcggagtatgtgggcctagtccaatatgatggtgtcctcagaggcacagaaacaggtgcatgggggacaatggccacctggccatggggagagagatgggggaaggaccaccagcaaccatgaagccagagagaggcccgagcacagcctccctcacagccccagcgggagccaggcctgcggcacctggacctggggcttctggcctcgggactgtgagacgaccaacctctattgtttaagtcgcccagtctcggtgccttgttacggcagctctggcaaatgcgtataccacagaagccagaggttcccttcatgggcccacccagaggagctggagaaccaggagaaaacatcattcagtgtttaaccaaggggaggggtcagacttgaaatatgagccaatcccagatgtcgaaggtctcctggtggtcttttatgggcatttaatatgctatttatagttttcatctgcacctgtagaaaatacataattgtctcaaactaagactcagggcaaaaaagtgtgtctgcaacattgcaagtcagcctggttggattacacagatgtggacaagaccttttaaaaaatatcttgtaacaccccaggctgagcaaccaacactccccagtggactaatgcagagccacgctgcaatcaagttcatcacaatcatgactactccgatattcggacacttcgctagcagaaagagactattttactgactcctactagaagctccagttcctctcccagcctttaaggactagaaatctctctaaagaaacagtattgctgggttgtaaataagacatcactcctctaacagaaatacaaaacatgatggaccttttttctctgcttaaatttatgaaggtcatagctttagaaagaccaatcaacacatcaggttcttattaagtgtatttaagacgaaggtaggtcattatcaactattttcacaaaggaactaggaaccgcatttcactcttaattatacataagttgactgtgcattttggggattgttcaagatgacttcttaacgtcagtggcttctccctgtcacttggacgctgtcctcacaccccctggcgtgctcccagggaagactagccaacttgaccccctgctgaagcaacacaattggggtcacagctcccagcagaggcaggacttcgctctctttgggtgagaggcacctggaggggctgccacagaactacatgcacccacccaagtcaggcaggttcacctggtggggctgacccaggactgcatgcatgcacctaagttgggcagatgtacctggaggggctgctcatgtcccgtatgcactcaccccggtcaggcaggtgcttggtaaacaggcccagctgcaaatgacagaggaggccaagcaaactgggaaccttcctgaggacagatgatggagctaggagacggcatctctgagatgcagcagagacttgcaccaggagccaggagccaggcagatggagaagcaggcatggtttagagtccagaaggcaaagcttctccctcagagccgactatgggcagagtgtcccaaccaccagtgtcgacattctgagtggatgactctgtcgtggggcctgtcctgtgcatgctaggatgttcagcagtatatctggccttgacccactagtggccagtagcatgtcccccctggacagcccaagttatgacaaccaaaaatgtctctagaggccgggcatggtgactcacacctgtaatcccagcactttgggaggccaaggttggcggatcatcttgaggtcaggagtttgagaccagcctggctaacatggtgaaaccctgtttctactaaaaatacaaaaaattagccaggtgtagtggtgagcgcctgtaacccccgctactcaggagactgaggcacgagaattgcttgagcctgggaggaggaggttgcagtgagctgagattgctccactacactccagcctgagcaacagagcaagactgtctcaaaaaacaacaaccacaacaaaatgtctctagacgttgccaaatgatgtccctgagttgggtgatgcaaaattacccctggttcagaagcaattgagtctttagaagcacaagtccagcctatctggggtcccggcaggttttgaagatggagactcgggtataggaggagacacacccatgcaccagactcttaaacaaagtcctagctgtgctctcaggaccgatcagaagccagcactgaagcagcagcacgaggttagagccaccagaaggaagcgtgactcgatcccgaggcccggattgctgagttgggcctcctcaagtcctcccttggcaccagcagaattactcaaaagcctgtgtctgcatcttagaggcagatggctacagcctgctctgggagggagcggatggccaggagagagccggggccctacctgacgtcagaactgtcctcccagccccagctcagcccggatgcaacagaagccagaagtgcacccaaggtgcaggcaagcagggattgttcagcacaaatgcactcgtcagttctaacttattcttaagctgactcagcagagtgcttcttcctctgctctgggtgatcatggaggccaccccaggcttgtctaatctctctcagccaatcacaggcctctggccccaggatagctaatttgtgtccacttggctgtgctgtggtgcccagttgtttggtcaaacaccagtctaaacttgctgcagggtatcttttaggtattattattattattattattattattattattattattattattattattgtttttgagacagggcctctctgtgtcacccaggctggagtgcagtggaggcttcacagctcactgcagcctcgacctcctggaatcaagcaatcctcccgcctcagccttccaggagctggaactacaagcaggagccacgtgattaacattgaaatcagcagatttgagtaaagtagattaccttcgtaatgtgagtgggcctcgtcgaatcagttgaaggccttaagggaaaagactgagctaccctgaagaggaaggaactctgtcttcagacagccttgagactagaacatctactcccactagaattcccagcctgctggtctgccctgtgaacttgtgacttgcctgccagccccacaattgtgtgagccaattccttaacaaaagcaaattgctgtctctctctagatagacagatatagatacaaatgacatagatatatgcatacatacatatctaaaatttcatatatacacatgcacacatatctaaaactacatatatatgtacacatatctataactgcatatatacatgtgcacacctatgcatagctatgtatacacatgtgcacacctatctgtaactacatatatatgtgaacacttatttgtaatcacatacacgcgtggacacctatctaaaaccacatatacacatgtgcacatctatctataactacatatatacacgtgcacagttacctgtaaccacatatgcacacgtgcacacctatctataccacatatgcacacgtgcacacctacgcatcaccacatatgcacacgtgcacacctacgcatcaccacatatgcacacgtgcacacctacgcatcaccacatatgcacacgtgcacacctacgcatcaccacatatgcacacgtgcacacctacgcatcaccacatatgcacacgtgcacacctacgcatcaccacatatgcacacgtgcacacctacgcatcaccacatatgcacacgtgcacacctacgcatcaccacatatgcacacgtgcacacctacgcatcaccacatatgcacacgtgcacacctacgcatcaccacatatgcacacgtgcacacctacgcataaccacatatgcacacgtgcacacctacgcataaccacatatgcacacgtgcacacctacgcataaccacatatgcacacgtgcacacctacgcataaccacatatgcacacgtgcacacctacgcataaccacatatgcacacgtgcacacctatctataccacatatgcacacgtgcacacctatgcataaccacatatgcacacgtgcacacctatgcagaaccacatatgcacacgtgcacacctatgcagaaccacatatgcacacgtgcacacctatgcagaaccacatatgcacacgtgcacacctatgcagaaccacatatgcacacgtgcacacctatgcagaaccacatatgcacacgtgcacacctatgcagaaccacatatgcacacgtgcacacctatgcagaaccacatatacacacgtgcacacctatgcagaaccacatatacacatgtgcacacctatctataccacatatatacacgtgcacacctatgcataaccacatatgcacacgtgcacacctatctataaccacatatatacctatgtatgcatgtctatacatgagaccagagaagtcccgcagtggtctccatgtctcatccaggacagaggaagcattctaccgagtaaatttatgaataagtttggcttgatgagtgcatttgtgatgaataatccctgtttgcctcactttgcatgtgcttcctggcttctgttgtacacgggctgagctggggctgggaggatggttctgatgtcaggaaaatccccagcttgccctggctgtcaggtccttcttagagcaggttgtagctattggtcactctctgtatacacgtgtctgtatatgtgtaaatctttctgtgtttgcgtctacctatctgtctgcatctttttagatctgtttctttggagagcactgactagtacaatcccatttgcttgtaaaggcagtctcattctgaaataagacaatcttccgaattcttgatgtaagcctctgcctgtctgggacattccccggaaagcaggggagggacttggcgcttcttctcttcacccctcatgtgccaccccccactaggctgccaaggcaggtcacccagttctgccggcctcagtctcctccctaggtcgctggctccaggtttgaaaagatgtgtatagggcagggattattggctctttcagtttatgggagctgttgctcctttcttctacttacttgagggtttattattttttaagtaattactttccatagacaatggaccagaaaacacctgaaagatagcgactaagttcaaggttgctccacgccaggcatggtgctcctggttcgagagctccactcacgtggtccttacgagaatctgagcaacatgaacaccgtttttcagctgttgaacctaagactgaacaaggttaaataatttatccaaagtcacaagctagtagttgcagagccagcatttgaagtcagacttagctgagtccaagcccgtattcttaagcaccacaatttgcttccaggcatcttgtttctataaagcactcaatgattttactacaacgatcttatttatatgagacttaagtcattcaaatatgtttttaggacatgttagtataaagacaaggtattgccaaaaagattttttacctttcttcctttttgttctagaaggtcaataatgaaatctaacaaaataataataaaaatagcagataataatcaattaaataacatttggttttattttctttttaaaaatctaagaaaaaaggggttctgacaaatgtgaccagaaaaccatacaattcagatatcctttttcaacaatcatttatgggtgtttcttgttatttgagaaaattgagttaggaacagtgactcctccaatccacttacagtatggaaagctgatatcacagtacattttaagtccttctgtggtgaacagtctccttttattttgctaatcatcatggagcagaactaaatatgaacacaggagtggcagcctggctcagccagcccagaaaaatgtctttaaaaatgaacttgtctaataaaccttaattccaaatacagaacataaggaaggagaatttacaaatcatggtattagcagtaagaaaagcaaaccagttaaaaggagttaatagagaataatgattgttaatatggccatgaaaatgggagaaaatggtgacaaaactgattatcaaagtagaaaaggtaacaaaataattcatgaatgatatcacggatgcaaaaaaaaaaattctgattgcatcaacaaagatttgtagacggttgggagtagtatggaaggaagaatgtaaaagtattcttttttgtaatttacttcaaacattgctaggttaatagatattgccattttatagtagtataaacaaaaatgctacaattatacttttaaaagatgcataccttccacatcacaggaggaaaaaaatgcttaaaaaaatcatcatagcaaaagtgaagaaaactgaattatgtcatgataaatttttagtaattgtgtaatttagtgctcaaaaatagtttagttcaggtgttttatgcttaattttggttactttcatcagtagagtaatatatataattccagttccacatttttgatcctcatgaccactagagggcagaagagaaaagtacaagaggcccgagataggtcaaatgagcctgatgccattttgcaatgtgggttttaaatggccttcccaaccaggaattctgattcgtggtagacacagctatgtcggtgtgccaatatgtgtatagaaaactcaatccagaatttaaatatttttcctaaattaggccttaaaatattattttgcataaaataagatgtaaaataagcatgtttatataaaaatattcaaattatttgacccaataacttctaggagtttatccaaagataaagactgatgtatgtggatgtttatcatagtgttttttttatcatgatgtataattgaaaatttacctaagtaatcaacaataggggattgtactaataaattatggtacagctatatgatggaaaactctagctgcttttaaaaatatttaagtgttttggggaaaagttatgaaatgttaagagaatattataaaaagtatgatttgatatttatgaattatataaactgtgttgatttaaatatagaaacatatctagatactgatgataaaaatataagtctggctgtgggagtacagatatagaagtagaaatgttccaaaaaaaaaggtcacagttgaaaaaaatataccccctgttaaaagttactgtctcttctttattacatttaaatttattttaagcatttatacccttcactgggaaaactgactagccataagcagaaaactgaaactggaccccttccttacaccttatatgaaaattaactcaagatggagtaaagacttagatgtaaaacccaaagccataaaaactctagaagaaaacctaggcaacaccattcaggacatgggcatgcgcaaaaacttcatgactaaaacaccaaaagcaatggcaacaaaagccaaaattgacaaatgggatctaatcaaactaaagagcttctgcgcagcaaaagaaactagcatcagactgaacaggcaacctaaggaatgggagaacatatttgcaatctactcatctgacaaagggctaatatccagaatctacaaagaagttaaacaaatttacaaaaaaaaaaaaaaaaaaccaacccatcaaaaagtcggcaaaggatatgaaccgacacttctcaaaaaaagacatttatgcagccaacagacatatgaaaaaaagctcatcatcactgatcattaggtattatgattaggcaaatcaaaaccacaatgagataccatctcacactagtcagaatggcaatcattaaaaagtcaggaaaaaatagatgctggtgaggctgtggagaaatgggaatgcttttatgctgttggtgggagtgtaactcggttcaaccattgtggaggacagtgtggcgattcctcaaggatctagaacaagaaatatcatttgacccagcaatcccattactgggtatagacccaaaggattataaatcattttactataaagacacatgcacacctatgtttattgcagcactatttacaatagcaaagacatggaaccaacccaaatgcccatcaatgatagactggataaagaaaatgtggtacatatacaccatggaatactatgcagctataaaaaagaatgagatcatgttctttgcagggacatggatgaagctggaagccatcatcctcaacaaactaacacagaaacagaaaaccaaatactgcatgttctcattcataagtgggagctgaacaatgagaccacttggactcagggaggggaacatcacacaccggggcctgtccggggtgaggggcaaggggagggagagcatcaggacaaatacctaatgcatgtggggcttaaaacctagatgacaggttgataggtacagcaaatcatcatgacacatgtatgtatatgtaccaaacctgcacattctgcacatgtatcctggaacttaaagtaaaataaaaaataaaaataaaataggtgggtggagccaagatggctgaataggaacagctccagtctacagctcccagggtgagtgacgcagaagacaggtgatttctgcatttccatctgaggtaccaggttcatctcactagggagtgccagacagcgggcacaggacagcgggtgcagcataccgtgcgcgagctgaagcagggcgaggcattacctcactcgggaagtgcaaggggtcagggagttccctttcctagtcaaagaaaggggtgacacacggcacctggaaaatcgggtcactcccaccctaatactgcacttttcccacggccttaaaaaacagcgcaccaggagattatatcccacacctggctcggagggtcctacgcccacggagtctcgctgattgctagcacagcagtctaagatcaaactgcaaggctgcatcgaggctgggggaggggcgcccgccattgcccaggtttgattaggtaaacaaagcagctgggaagctcgaactgggtggagtccaccacagctcaaggaggccggcctgcctgcctctgtaggctccgcctctgggggcagggcacagacaaacaaaaagacagcagtaacctctgcagacttaaatgtccctgtctgacagctttgaagagagtagtggttctcccagcatgcagctggagatctgagaacaggcagactgcctcctcaagtgggtccctgacccccgagcagcttaactgggagacaccccccagtaggggcagactgacacctcacacggccgggtactcctctgagacaaaacttccagaggaacgatcaggcagcagcatttgtgggtcaccaatatccgctgttctgcagccaccactcctgatacccaggcaaacagggtctggagtggacctctagcaaagtccaacagaccttcaactgagggtcctgtctgttagaaggaaaactaacaaacagaaaggacatccacaccaaaaacccatctgtacatcaccatcatcaaagaccaaaagtagataaaaccacaaagatggggaaaaaacagagcagaaaactggaaactctaaaaagcagagcgcctctcctcctccaaaggaatgcagctcctcaccagcaatggaacaaagctggacggagaatgactttgacgagttgagagaagaaggctttggacgatcaaactactctgagctacagaaggaaattcacaccaatggcaaagaagttaaaaactttgaaaaaaaaattagacgaatggataactagaataaccaatgcagagaagtccttaaaggagctgatggagctgaaagtcaagggtcgagaattacgtgaagaatgcagaagcctcaggagccgatgcgatcaactggaagaaagggtatctgtgatggaagacgaaatgaatgaaatgaagtgagaaaggaagtttagagaaaaaagtataaaaagaaatgaacaaagcttccaagaaatatgggactacgtgaaaagaccaaatctacatcagataggtgtacctgaaagtgatggggagaatggaaccaagttggaaaacactctgcaggatattatccaggagaacttccccaatctagcaaggcaggccaacattcagattcaggaaatacagagaatgccacaaagatactcctcgagaagagcaactccaagacacataattgtcagattcaccaaagttgaaatgaaggaaaaaatgttaagggcagccagagagaaagctcgggttacccacaaagggaagcccatcatactaacagcggatctctcggcagaaactctacaagccagaggagagtgggggccaatattcaacattcttaaagaaaagaattttcaatgcagaatttcatgtccagccaaactaagcttcataagtgaaagagaaataaaatcctttacagacaaacaaatgctgagagattttgtcaccaccaggcctgccctaaaagagctcctgaaggaagcactaaacatggaaaggaacaaccggtaccagccactgcaaaaacatgccaaaatgtaaagaccatcaaggctaggaagaaactacatcaactaacgagcaaaataaccagctaacatcataatgacaggaccaaattcacacataacaatattaactttaaatgtaaatgggctaaatgctccaattaaaagacacagactggcaaattcgataaagagtcaagacccatcagtgtgctgtattcaggagaaccatctcatgtgcagagacacacataggctcaaaataaagggatggaggaagatctaccaagcaaatggaaaacaaaaaaaaagcaagggtcgcaatcctagtctctgataaaacagactttaaaccagcaaagatcaaaagagacaatgaaggccattacataatggtaaagggatcaattcaacaagaagagctaactatcctaaatatatatgcacccaatacaggagcacccagattcataaagcaagtcctgagtgacctacaaagagacttagactcccacacaataataatgggagactttaacaccccactgttaacattagacaagtcaacgagacagaaatttaacaaggatatccaggaattgaactcagctctgcaccaagcggacctaatagacatctacagaactctccaccccaaatcaacagaatgtacattcttctcagcaccacatcacacttattccaaaattgaccacatagttggaagtaaagcactcctcagcaaatgtaaaagaacagaaattacaacaaactgtctctcagaccacagtgcaatcaaactagaactcaggattaaaaaactcactcaaaaccactcaactacatggaaattgaacaacgtgctcttgaatgaccactgggtacataacgaaatgaaggcagaaataaagatgttctctgaaaccaacgagaacaaagacacaacataccagaatctctgggacacattcaaagcagtgtgtagagggaaatttatagtactaaatgcccacaagagaaagcaagaaagatctaaaattgacaccctaacatcacaattaaagaactagagaagcaagagcaaacacattcaaaagctagcagaaggcaagaaataactaagatcagaacagaactgaaggagatcgagacacaaaaaaaaaactcttcaaaaaatcaatgaatctgggagctggtttcttgaaaagatcaacaaaattcattgaccactagcaagactaataaagaagaaaagagatgcaataaaaagtgataaaggcgatatcatcaccaatcccacagaaatacaaactaccatcagagaatattataaacacctctacgcaaataaactagaaaatctagaagaaatggataaattcctggacacatacaccgacccaagactaaaccaggaagaagttgagtccctgaatagaccaataacaggctctgaaattgaggcaataattaatagcctaccaaccaaaaaaagtccaggaccagatggattcacagccgaattctaccagaggtacaaagaggagctcgtatcattccttctgaaactattccaatgaatagaaaaagagggaatcctccctaactcattttatgaggccagcatcatagtgataccaaagcctggcagagacacaacaaaaaaagagaattttagaccaatatccctgatgaacatcgatgcaaaaatcctcaataaaatactggcaaaccaaatccagcagcacatcaaaactcttatccatcatgatcaagttggcttcatccctaggatgcaaggctggttcaatatatgcaaatcaataaacataatccatcatataaacagaaccaatgacaaaaaccacatgattatctcaatagatgcagaaaaggcctttgacaaaattaaacagcccttcatgctaaaaactctcaataaactaggtattgatgggctgtatctcaaaataataaaagctatttgtgacacacccacagccaatatcatactgaatgggcaaaaactggaagcattccctttgaaaactggcacaagacagggatgacctctctcaccactcctagtcaacatagtgttggaagttctggccagggcaattaggcaggagaaggaaataaagggtattcaattaggaaaagaggaagtcaaattgtccctgtttgcagatgacatgattgtatatctagaaaaccccactgtctcagcccaaaatctccttaagctgataaccaacttcagcagtctcaggatacaaaatcaatgtacaaaaatcacaagcagtcttatacaccaataacagacaaacagagagccaaatcatgagtgaactcccattcacaattgcttcaaagagaataaaatacctaggaatccaacttacaagggatgtgaaggacctcttcaaggagaactacaaaccactgctcaaggaaataaaagaggatacaaacaaatggaagaacattccatgctcatgggtaggaagaatcaatatcgtgaaaatggccatactgcccaaggtgatttatagattcaatgccatccccatcaagctaccaatgactttcttcacagaattggaaaaaactactttaaagttcatatggaaccaaaaaagagcccgcatcgccaagtcaatcctaagccaaaagaacaaagctggaggcatcacgttacctgacttcaaactatactacaaggctacagtaaccaaaacagcatggtactggtaccaaaacagagatacagaacaatggaacagaacagagccctcagaaatagtgccacatatctacaaccatctgatctttaacaaacctgacaaaaacaagaaatggggaaaggattccctatttaataaatgctgctgggaaaactggctagccatatgtagaaagctgaaactggatcccttccttacaccttacacaaaaattaattcaagacggattaaagacttaaatgctacacctaaaaccataaaaaccctagaagaaaacctaggcaataccattcaggacataggcatgggcaaggacttcatgtccaaaacaccaaaagcaatggcaacaaaagacaaaattgacaaatgggatctaattaaactaaagagcttctgcacagcaaaagaaactaccatcagagtgaacaagcaacctacaaaatgggagaaaatttttgcaacctactcatctgacaaagggctaatatccagaatctacaatgaactcaaacaaatttacaagaaaaaaacaaacaaccccatcaaaaagtgggtgaaggatatgaacagacacttctcaaaagaagacatttatgcagccaaaaaacacatgaaaaaatgctcatcatcactggccatcagagaaatgcaaatcaaaaccacaatgagataccatctcataccagttagaatggcgatcattaaaaagtgaggaaacaacaggtgctggagaggatgtggagaaataggaacacttttgcactgttggtgagactgtaaactagttcaaccattgtggaagtcagtgtggcgattcctcagggatctagaactaggaataccgtttgacctagccatcccattactgggtatatacccaaaggattataaatcatgctgctataaagacacatgcacatgtatgtttattgtggcactattcacaatagcaaagacttggaaccaacccaaatgtccaacaacgatagactggattaagaaaatgtggcacatatacaccatggaatactatgtagccataaaaaatgatgagttcatgtcctttgtagggacatggatgaagctggaaaccatcattctcagcaaactattgcaagagcaaaaaaccaaacaccacatgttgtcactcataggtaggaattgaacaatgagaacacatggacacaggaaggggaacatcacactccggggactgttgtggggtggggggagggatagcattaggagatatacctaatgctaaatgatgagttaatgggtgcagcaacaccaacatggcacatgtatacatatgtaacaaacctgcacattgtgcacatgtaccctaaaacttaaagtataataacaataaaataaaaataaataaataaaaaataaaaataaaataaaaattcatccattctaaaagaaatgtttatacttttgtatatttttctcattttctacattgtaatatactgtattccttttaaattcagggaaaaaagaaatacacattatgtggtattaataaagcaaaacctggaccctctttggtctttcagtgtcttaaaatcataaagccagacccatttgtgatatatggaggctgatagttgaaaagaatgtacaaatctcaactgtatttcattttgctgttctattaaagctatcttatcattataatagaaaaaagaaaaacacagtctttaaattaaaggaacagaacacatacaaacacaactgctttcactcaaaaaactgacaagacactgaaactggtcccagtggtcaggtgaacattgaccatgtggcattaaagagccagtgcccagcaagagtgactttcttcttgaacctgacagccgatcgcagctctgcatcagacaaaaccagatccttcattctctaagctcttctgaatttttcaggatttcactttccttgtaaagggcaggtaatcatcgtggttggaggttgtcaggggtcccctgcaccaagctaagtaatgaggactgcggggtgagaaagacggactctccctgaagggtcccagtgatcacagctgggctccaggctgtgggctgctgccccagcaggctcaggtgcagtgtgtgggcaccgtggtgggatgctcggaccacaggaatcaggaataattttccataaaaggtgggacttgagcctggactgcagatgggagcagaaaggtgtccctggcagagaaaggagaacaggaagcatccaggcagtgggctgagttgtgtcctctggaccaatagtcaaggataagggaatggcttctagatgctgtggggacccacttggaaccccaggcactataaagattattttaatctgaagacatttgagactcaacagatacagaaagaagccttctcagagcttttcttatctgaccagcaacttctcagagcttttcttatctgatggaaaacagcaactttcaagaaatgaggactgctattaattccctcctcggggagacttctattcctagcggggagactaaaagtaagcctacgataaatccccactctgagggagttgtagagccctgaaaaagacaaaaagaccactcatgtccatatggacaaacattatcacaaactttcttatctctcatatggccccctaaaaatctggcttgtcggctgggtgcgatggctcacacctgtaatcccagcactttgggaggccgaggcgggcggatcacgaggtcaagagatagagaccatcctggccaacatgataaaaccctgtctctattaaaaacacaaaaattagctgggtgtggtggcacgcacctgtaatcccagctatttgggaggctgaggcaggagaatggcttgaacctgggaggtggaggttgcagtgagcagcgatggtgccactgcactccagtctggcaacagagactctgtcttaaaaagaaaaacaacaacaacaacaaactcatttgtctttcctgaagaaatctattgctcttcccattggagcctctctcctctccctttccctgctaagttggttctacagacccatattcaaaccactcctttcagttgctcaaaactacgcagtcctgagtgcgactgcacagtcctgagtgcacgcacgtggcacactcacacgagtcactcacaactgcacagtcctgagtgcacgcacgtggcacagtcacacgagtcactcgcaactgcacagtcctgagtgcacccatgtggcacacttacacaactcttttctcccgctaatctggcttttgtccatttaacttggaggctcccaggtaccgaacctgagaaggcaaagcttttcctctctacactgcgtttcattctccagggcatttgagagcagttcatgaagagtggctctcacgcccgagcaaagcagtcacagcactggcttgtcggtctgagcacagctgaggatgatgtggagacaatccctgggttggaaaaactccgtttctccaatcccaggctctgctgccgcatctctgtgtctccttcatcaggcactctgcgtcccagggagggaggcaccccacatccgtgctggggacattgtgcaggatggcaggggcaaggcacacctcacaaaagagatggatgccactgaaggagatgaaattatttccagaaatgttttttttttttagaatcagtggcatgacatatagttgatccttgaacagtgcaagagttagggacacccagctccctgcagagtcaaaaatccatgtctatctctggacccccaaagcttaactactaacagcctactgtggactggaagccttactgataacataaacagcctattcacacatatgtcatatgtatcatatactgtattctcacaatagggtaactagagaaaagaaaatgatattaagaaagttataaggaagagaagatgtatgtaccatccattaagtggaaatggatcctcatacaggtcttcatccttgttgtccaggcagggggtgctgacgagagggaggaggaaggctttgtgttgctgtctcggggtggcagaggtgggagaaaatctgcatataatcggacacgtgcagttcaaacctgtgttgttcaaggttcaatggcaattagtttttattagaaaaaatatatcaatgtggagaagcccttgaaggaatttaagcacagaggtgattgataggtgtaaccgccgggtccagacaggccagaacttgaactcaagttgtgctggtcaagggaggtaaaagaatcaaaccttgatgaccagaagacactggagtaaaaggcaagagtgaaaaaaaccttgatttgttacacggtgaaaagcagcagaagaaaaatggcacccgaatcatcgatgtcactaccgttggttggtcaggtaggccatgagaaccaaccagagatcaaacagagcaaaatcgaatatgcgataatttgttcatttccattccaccattcgccctcagtgtttatcccatggtaattaaaaccaactgtagctattgaacaatggaatttgctggtcaagctcttcagagcccaatgtcatcagccttggggtggcccctgcaagtccttgctgtgtccattctgttctcactgaatgcagaaggtgcagcccagctcagggatgagttacagctggcctcaaaagtgccaatgccacggcctaagcatctgggacagacactgaggaatgtttgatgagcccttaactaccaaaggtggacaactctgctattgatattaatatttagcacccaaaaggagcatcctggtgctgaaagagggcattagggagcttccccagggagccccaaacagcgtctctgcagatctgagcgctccctgttccggctgcaggaggctgtgttcagcctgctgggtgctggccctgcagctggggagcggccctctccaccacagtggtcttcagactggggtcagtgtacatgcaaagaccatctatggggcacatggcataagtatttttaaagtaattacttatcatttccagctcgtcagctctttcccaaaagtgatctgtctaggaacttctctggccaatccctttcccagacccctttacaatctcctgcccccttctccacagacaggtgcatcttggacctcgcacccatcccaaacccctctccagggtgtgttcctggtggtggcgccctccctagagcacagcaccagagagagcgcccctgtgaatatcagcagccaattgtacccagtgactaaggaaaccagccttcagcaaatgcggcagtttcctattctttgctttccacaaaattgaaagagagcccctattcaagttgtcagctgagagagctttaaaaacaatcttgtataacaagcacaacgtgctttttggcatacaacttgaaaggagctcaaaaaccagtgacatagcaaatctttttccatttccatctttcattcccatttatgtgaacaagtttgctttagctcataaaaatgaaactagagaaaatctcagtgccgagcctgttttaggagcaccccaagggtctgtgaacccgggcaggggcccatccccagcatcgctgatattgaatttctgagattttaattttataagagtcaattttttaaaaactatttaaattttaatcaattgtatactactaataattataaggataattcaaagaaacaacatttagagtctgtggttacagaaaattacatttaaaaaatacattcaatttatatacagattttttactgtaagaatgtaaaggtgatgaataaagacttttaagccaaaaagtatacctatcacactggcataatatcctaaaggagtagttagaatggaaatttgagcttatagagaaaaaggagtcacaaaaaaaattgcatgctcagaaggaaagcattttcatgttttttttttttttaaaaggatgagagtggtgtgaaatcactacggtaattggattccagcggaaacacttaagagttgtgcgagagttttattttggaatatcaatgttttgaaaggccagaagatatacctttttcaactaataaaccttacttttagctgagtatttttttttattttaatagttttgggggaacaggcggtgtttggttccatggataagttcttcagtggtgatttctgcgatctgggtgcccctgtctccggagtagtgtacacagcagctgatgtgtagtccttcatccctcaccctctcccacccttctgccaagtccccagtaacaggtcatggctgcgatctctcaggagatgcgctaagcacaggccccaggcctgcctggtggggatttgctcagaagcttttcgtggagaccgtgggttccttttaaacaccaggtattttttttgtttctggcagtctccagcctaatacactcatttgaatcctggaaaatagatcactctgtttcaattaggccaactcctcaggagttctagaaaaatattttaagccagtgactcattgaagtcccagatgacagtaccctctggggcaattaggccaacgtaccaggaggccggcaaagaggcttccagtggctctgacacgttgccactgtgtctgccctcagcccctagagcacggggaggacatgggggagcagcccagctcccggacagttctgcggcacagtctagggctctgcattctggcctcctgccacatccagggcgctgaatgccatggtgtgtgtccttccacagcgcatacactggaacacaaacgtcagcatgacagcattaagaagtgactaagtcatgagggccccatccttatgaatgggactagtggaccttacaaaaggcccttccacctcctgtcatgtgaggacacagcacttagcccctctggaggacgcagcaacagggttctgtcttggaagcagaaatgggtcctcaccagacaccgaacctacagtgcctcgatcttggacttccggcctccagaactgtgagaaagaaatttctgttatttgtaagtcacctggtctagggtattttgttacagcaacctgaacaaagacagttggccttcctttacctgagatcattttaaacaccattatcctcaactcaatcgtttccttaactcaaggaagatacctgatttcatggcaggcactggaaatatatgcctttggttttccctgtaattgcaaagaaaatttatatgtaaaataactgaaacaggactcctcatttcagcatttaaagcaaaaatctttaaagttaataaaacttctactctacaataagaattgtataaatgccaaagttttggatgtaacagaaatgagagtgatactgagaaattctctaggcggtcatggaaataagaagacaaagaaaaaaatttaaaccatggtatgtgcacttttgtaaatggttttgctgcaagtgcagtgaggagttttgtggtgatttaattgtgtctacttttataaaaatttaaagcattcaaaagaatctgatatgctaaactcgtgaaaagtttaattgataaagcttgcaatcaaaacataaaacataaagatagtatccagggagaaaagaaacacagctaagtaaaagcggaggaggtggggagaggaaaagaatctaaaggaaagggaggtttattttattttattttattttatttattttgagatgaggactcgatctggtacccaggctggaatggagcagtgcaatcatagctcactgcagcctccaactcataggctaaagtgatcatcctgcttcagcttcccaaatagctgggactacaggtgcatgccaccatgcccagctaattaaaaaaataatgtttcgtgaagataaagccttgctgtgttgcccaggctggtctccaactcctggccccaaatgttcctcctgcctcagcctcccaaagtgcagggattacaggcataagccaccacacacctggcttgatgtttaatgagtctaattttattcattttgctatattcaagttttaaaagttaaaaatattttacctttatttaaaatgttctgcataaatatattcatgcacataattttcaaacaatgagtatatttgactgcaaaacttcatattttgagaaatcaaatgagttaaatttgtaagttctttgccttttagttgtgtgaatggtttataattgactagagaaaaacaattgagaaggaaagtctttaacagtgtttaagataatgtaaattcaaaaatctgagaggaaaattaaaaaaaaaaaatttttaaatccctccctaggccgggcgtggtggctcacacctgtaatcccagcactttgggaggctgaggcaggcggatcatgaggtcaggagatcgagaccatcctggctaacacggtgaaaccccatctctactaaaaatacacacacacacacaaacaaattagccaggcgtggtggtgggcgcctgtagtcccagctactcaggaggctgaggcaggagaatggcatgaacctgggaggtggagattgcagtgagctgacatcacgccactgcactccagcctgggcaacagagtgagactccgtctcaaaataaaaaaaaaaaaaatcaatccctccctagacattaggaaagagtaaagaaggaaattacttttagttcatcgtagtggccctttatttttacttattcattcaaggaaaaaaactctagaaaaatagactacacaaaacataagatttaaaaataagaccagatctcggattttggaaggtcttatgtgctcagaatgagttaaaattcagacaaaaagagatagaagctctcacataacagtgaggctgcctttgctgcacgaccgtctgccagacactaacgggaatgttttctgggctgactcatttggtctttagaggggaagactctctgaagagcatccctctgaggggactgtgatgggctcccccagtttgcagctggagaaactgagacatgaaaaccagttgatctgtccaggtgcactcaggtggccatgactcagccaattcctcggacgaaactacatcagaataaagtttagccagtggttgaacgcttgtcactcattaagaaatagagaaaattagacaagccatcttactaataaagacaaaagaatttacttgaatgtaaccataatgttaaattaaatgtttaaatgataatcttcatgaacaagtgataaaccatagattatatataatgtatgtatatgtgtgtgtgtgtatatatatatatatatataaaatgattaaatgagaccaattagactaatttttaaagtttacattgtattcttttaaccaataatccttaaatgttgggtactaaatctatttattttgaagcaagttggccctgaaactttgtgcaaactaattggaatctaagaaaaaaggacattccaaaacagagacttagaaattattctgcactttgaccaaatacccttcaaatagaaaatcaaaagtatttgacaattaaaacttccactggtaaagtgtgcaagaagcgatctttttagaagtttgctctttgttacctgaacaggtttgtaattgcatcaaatgtatgcaaaaattgacgactgtaagtttcattgttacccatagttcctaaacctttcaccaaaacaggttgctgagctgatacgctaataactatttcagaagtagttttgttttggtaaacaaaagcccagcacaggctggaatacagttgttggccctcatgcccggctcacaaggtaaagtcagcaacccacatgttatgaggcccaaaccaagagttaatctaaaagctttagagccccggaaatcccgtgtcaggagtctaaacggcaggcagcgagagttaaactactggcctctgccaggactggccaggatgccaaatgcttagctgactaattcggatttcagcaaaaccatattccacacgtgagactctcagtggatctgtcaagcaggaaaccccacagagactgattttgtgcctgtgttattcacacagtcgccatggagcgaaagactgggaagcacgagatgttttaatttacatacaatttagaaaattgcctcttagatattccatagctatgtttctaagccatttttttcattctaaaatggaaatccccttggggataagcaaaactggctgaaaattgcttttaaaatgttagaaaatgtaatgttgttatgaaatgcaactgaaatgtgctaatgtctttttcagtctgttctagtgtaaccctaataatattgcaaaaatacgagcctgtaaaacattcttcacctgaaatttctgtgaggtttctgaagtctgatgattctggttattgatttgattgtatttgctaatttccttaattcataattctataattttaaaagtcaagcaatacagtgtgagataataattataactggaataatatatgtaaattagtaaaaaaaaaatacttaactagtaaagccagagttaacattaaagctttctgtcacagataaataacagcccacaggcccataaaaataaagttcaatgagaggtgtaggcattatatagagcattatatatttatctgtatatgttaggtatcatatatttatgtgttttatatctcctattgttttgtccattaattttttaatacaatcaaagatattaaatactcagtggattcacattctctggtatctcactgcggggaaattaaaatttattctctttttgaacaaacgatctgtgcaactagactaacaagacatatgatctggattgacaaaatttttaaaaagcattccaaattaaagctttctgttatagataaataacagcccacaaacccataaaaataaagttcaatgagaggtctaggcattacatagagtattatatatttatctatatacgttaggtatcatatatttatgtgttttatatctcttattgttttgtccattaataattttttaatacaatcaaatatattaaatactcagtgcattcacattctctggcatctcactgtggggaaattaaaatttattctctttttgaacacaaatgatctgtgtaaatagactaacaagacatatgatctggattgacaaaatcttttaaaagcattccaaaatacttagatttgaattaaagaaaaaggaattaatagaggcatctcaaaagaaaatatactgacagattaagtagtcaaggcagcaggattacactttttctctctttcctcttgagacattattattaaaaagaaatacaggaaagcttctggaaatgaaagagcaaatgcatatgaatccatctctacttagacaacaattgcaatagagtaattattttggaactctggggtctattgaaggcttgcatctcacaggggatgtctcgaatgataaattatggttacatttggtcaattttacctcttggcgtagtaacagttgcctgctctccacccccagccctctatcaggcagctgggcagttgttcctttcgcaacctgcaggtagcttaatgggcaaagagaataccgtcctccaatgacaagggatctgtgctctgatcacagagttgcagacagagaggcttgctatcattgttgtcgcacctcccctcattgttgcaaggccctgtccttcctgctgaagtgacttccaggagatttaaagaatcggcacattttttccactttatttttcttaccccctcccccaacttgggggccagatgttgaagaccagcatattaagaagcaactgcatatgcagggaaaattacacagcaaccatgcatgcccagggaaaggcacagactcagaaaacacctgcaaatacctaaagtctacatctcagtctgatccttgacacagagacagcctacaacaattttttaaatgttagcaaatcctgaggaaggagaatctgaccttcagagctaccacattattagattccaatgtccagtttcaacaaaaaatcataagacataccaaaaaacaggaaaataaggctcattcaaaggaaaaaaataaaccaaaaactgtccctgaaaaagacctgatggtagatctactagacagactttaaaacaacagtcttaaagatgcttgaagaactaaaggaagacatggaagagcttctgtgtgaacaaaatgaaaatattaataaagagatagaaaatccaaaagaagccaaaaataaaacctggacctgaaaagtacaatacgttaaattttaaaaatcactaaaggggttcaaaggcagatttaagcaggcagaaaaaagaatccacatatttaaggatcggaaaatggaaattagtcattctgaggaacagaaagaaaaaggattgaagaaaaattgaacagagtctaaggtacctgtggaacacccttaagtgaatcaacatatgcattataggagtcacagaatggggaaagagagaaagggatagagagagaatatttaaagaaataatggctgaaaatttccaaaatttgacttaaaagacatgaatattagcatccaagaaattcaacaaactacaagtatgatgaactcagagactcacactaagacacattataatcaaactgttgaacaacaaaggcaaagagaattttgaaagcagcaaaagagaagtgactcatcacatacagagggatcctcaaaaaatattagcagatttctcatcaaaaactttggtggccagaaggcagcgagttaatatattcaaagtgctaaaaaattaaattaaaaacccatcaaccaagaattctatattcagcaaaactgtactttaaaactgaagaagaaattaagacattcccagataaacaaatgcagggggagtttgttatcatgagacctgaccttcaagaaatgttaaagggagtcctgaagattgaaatgaaagaacactagacaataactaaaagcaacatcaaggaataaagatctcagtgatggtaattatatgacaattataaaaattagcataattccaacaatgacatgtaactccactgtttgttttctacaagagattactgcattaaaaaaaaaattagtttatgtttttggacacaaaatacataaagatgtgattttgtgagttcaacaactgaaagaggtggtaaaggggctgctgaagaagcaaaattgttgtatgctattaatgtcatgatggtacaaattcaaatcacaatgttacaattttataatgttaaatttagtctctgtgttaaccacaaagaaaattgctaaataatatacacatataaatttaaatgttttactataaaaatcaactaaacacaaaagaaaacagcaatgcagaaaatgagagacaaaacgctataatatagaaaacaaatagcaaaatgacagaagtaagtccctccataccaataatcactttaaatgtaaatggattaaactctccaatcaaaaggcaaatattgggagaatggataaaaaagacatttagacatgtggctaaatttaatcatccatcctcagttctcatctttcctgacactcgtgatcatttcctccgttttgaatcctcttcttacctagcctttggtatcaatccctcagaaaatcctgttgactctgccttccaaatatacccacacatgtgttcttttttccacttccctagtgacctacctctggtccaagcagccaccacctctggcgtggagggttgcaggtctccccgcttctgccctgctccctctccatctcttcctaacgcacagccagggcaatccagtgagggcagaggacggctcccactcagaccccaggggctctccatcttagtctgagtagcagccccattcctacagaggccaggaggtgctacaccacctggcctggtgacctctgcggcctctcccctgctgttctcccccaacttgctctgcaggtcacgctggcctcccacagtctcccaccgtctgcacacagcccagtgtgctcccgtctctgcctggagtgtcctgagctcaggtggctgcagggctcacttcctgggcttcctcagtcttcattcgtaaggccttccctcaacacctgtttaaaatgacagctgctccacccccagcttcccagtcccccttatcctgccgcactgatttctgccatggcactcatctccttctaaggttccatataatttaactaatgaggcagccctgggagtgcagagctcccaccgctgcaggggagcacgatggacccatggctccactgatgcacctcgggatgcatgaggcagccctgggagtgcagagctcccacccctgcagggcagcacgatggacccatggctccactgatgcacctcgggatgcaacaccatgttcacaacaaggccaagctccccgtggtgctccctggaccgggctgggacaggtccatcacagggacacacaccactcctcagggagcaacttttcacccaggacgccctgttggcctggacagacctttcttgaagctgagactctcctacccctaccttttcttgccttttctccttctcacagatgttggacctgcagcgtggtctgaagtctctctttactccctctccaagaaatctccagcatgtccaactctacctggtttctactcctcagtgagtgtgagctgtacaattgattattattactgttattgctttgttcatggtctgtctcaccccactagagcatgaacccgccagggcagagggctttggttttttcctgtgctttcctggtgcctggagcagggcctggctcatagcagagatgcagtaaatctgtgctgaataaatgtcttacgtattgaatcagatgatgcattttaaaagcatgccacctagtcttgcacaaaagaaccacgtgttcagtattgaccatatttacactaaaaaaaagtcagtttccattaaagaaagttaaagtatttaagtaaataaaaacatagactgtgttcttggggtaggagcacactttagcagtatcaagtatagtcatataaaatgtaaatgtcagtatccccaaattgtctacaaattaaatgcaattccaatcaaaattctagctggatgttgagacattcataaattcatgctaaaatttgcttggatgaataaaggtccagaagtagcctaattaactgtgaaaaaacagggtacagaggcgagacttgacctagtaaatatagactgcaagacactaatagtgatggtaatagtaatctttacaagtatggtactggtgcaaaaacagacaatagatcaattagccagagtagaaagctcagagagagaccacatatacacagaagctcagcatcacaagtcaatgggggaaaggatgaattttatatcggtggtttcaggaaaactggattactacatgaagaagatgagggcacattctttgtagcactatgtgtagcaggggagtcctggaaggctaaaggcctgcaagtagaaatttaaactctaaagctcagagaagataatggaggagtatacttctgtgacttgagaatagagaaagatgtttaaacgaaaatatctccctacaaaataatggatttgacaatatcaaaatctaggggttttattcactgaaaaacaaaatggacaaagttaacacatggcagataggttgggaggtgatatttacaattttgaaaaccatcaagggactgatattaagaaaaacagggaaagtctgtgaatccaaagaaaagacagaaagaaatcaaacagaaaagttgcatagggtgtggacaggtgagtctcagaagagaaaacccaatggctaacatgtatgtaaagagatggttaaagtcatgtcagataaatgcaaattagaacatcagtgagacaccacttcacacaagtgtcagactgacaaattaggatgctgggtggtaccagggactaaggcaggcacaggagcacaggattccatgagctgcaggtgggtgcaggtggcacagccatggtggaaggcatcctggcgatgtttattcagattaagaacaggcagccaatgactcagaacttcattcctgagaacgtgttcaacgcaggcccatggatgcatgtgaggacgctcatgcagccttactcgtggccatgtgatgctgggggaatgaacaggcatgatgtattagtctgttctcacactgctatgaagaaatacctgagactgggtaatttataaaggaaagaagcttaagtgactcacagttacgcataactggagaggactcaggaaacttacaatcatggcagaagacaaaggagaagcaggcacctgaagacaaggtggcaggatggagcgagtgcacgcaggggagatgccagatgcttctgaaaaccatcggatctcgtgataactcactcactgtcacagcatgagggaaagcactcctgtgatccaatcacctccacctagtcccgccctcaacatgtggggattatggggattacaattcaagatgagattttgggtggggacacaaccagaccatatcagatgatgtgtgggtgcgtggaatgctctggaatgtgtcacagcccctggctataagcaacagactcgggagtgcaaagtaacatggaaagatctgagcccacgaggatatttgcctctttgtgacgggaaagtgagggcaaaaaggaggcaaacagatacatagagagatgcattaaagacgagatgtgccttgaactgagattgtgactaactcaatcctatgcacttgaggctaaaaaaaaagtatcttaaatagctgagaatcaccggtaatcaatggcatcacctcctatgatcaggctttgtaagttgcctttgtgggtcgaggctgtcttcttgtccaccccacgcaggcctgttaccggggttaacccgagtctaggtccggataaaagcctatatatggaaaacttcatgggatctccttggaatccattcttagcaactcacaaggtcacaaagtaccatggatgagaagtttggacacatgtcaatttcctgcctaagcccaggctcagggaataagctgcctctttctgatcctcaaaacataacaaggaccaaatgcagtgtaccaacacagagcaccaagtgtctccacacaagatcacaaccacatgagacagtgacaacttcatacaactccaggagggtccatcttccctcgagaagccaggactggacagagaaagtacccggaggcccgcacagctggcaaatagttgatgtattttcagacagcacagtttcttaaggaccaagaatacgatgacatcacactaagaagagaaaataaaatcttgaaaaatgacttaaagtataggtcaaatatacatgccatgcgggtgctccaagagatggacaaattgatcttattgatcatatttttatacctttaattacatttgcttatctcagcacccactcgctctagagcccctcaggtgccctcagccaagtgggactggactgaccgccaacagccctggttccctgttggcctcagacagagcttgcccagaatgttattttcttggctgtgttttcaaattgttgtcatgtttatcctaaggtcataattttattctgcctcataattttccacctgaaggggctgcccaaaacctaactacatgcctgggcaacatagcaagactccatctctacaaaaaactataaatatgagccaggtgtggttgtgtgcctgtagtcctagctgctccagaggctgaggtgggaggatcacttgagcccaggagttcaaggccacagtgaactataatcatgctactgcactccagcctgggccacagggcaagacctagcctcagaaaaaacaaaataaaaataaaagtgttttatatgtacaaaaattcttcttaatcttttgatccaaggaaagcatcccctaaccttttaaaataagttcaaaacagtatttttgcaaatctgagtgcagtccgatttctactagagttccaaagtcttggtgaaccacccattcttcttaatcaagttatcatatacataattactagaataacagctctcaaaaattaaaattcacttaacaagaaaattatattgaacacaatacattctttctccagtgactccagagccatccgaggatatttcagtgcctcgtcaagatgttaattacgaagctgaacaatagttgctgagtgcactgtagattttaaatgagtccggggaacttcttgtgaaacctggctgtcatcatctcatcctggaaaacgagtggatgaaagcaagcgggtcggttgtggtggctcaagcctgtaatcccagaactttgggaggccaagacgggaggatcaacctgaggtcaggagttcgagaccagcctggccaacatggtgaaaccctgtctctactaaaaataaaaaaattagccgggaatggtggtgggcacctgtaataccagctactcaggaggctgaggcagaagaattgcttgaacttgggagacagaggctgcagtgagccaagatcgtgctgctgcaccctggcctgggcgacagagtgagactccatctcaaaaaaaagaaataaagcgtctgggctcccagatgttggcagctccctcccagccctgccctcctcccacagcccccttgcctctctctcaactctcagcttaaatgtcacctcccaagagaggccttcccaggggctgagtgtggggagatgtcccttttaggctttctctcaaagccctgcagggccctgtacttatttagtgcaatggaaatcctccacatggggtctgtgttgggcgcgtggcctcccatacccgtggccacgtggcctcaagctcccgctctcgtgtggaacctgaccctcttccctgcaacttcacatctcactccaggaataattttatgccaaaaacttaaaatatttttaagaacctacttatttgcatgttttctagtgacctcatgagaagatcaatttagcagcttctcacatttttcatctttgagattcacagccacatcactgagaaatatgttaaggaatatttaacaggttataaactacagcaatcccactcaagactaaatagcaccaagacagttttctatagaaatcgggaaactctccagctctcactgaaaataatgctaagacaattcagagtcaaaaaggcctcatggggttttttctccagataactcaattaacccaaactaaatcctgagacactcacgcacctccatgtctcttgattttgtttgtggcttgaggggttgagaggcactgcttctcaccgtgacccagaccaccgctccctggagaacggatccagactttccccacatcttttatagtacctccatatcacacatgggggaggtaggtccacaggcctgcatttaacaagcggaagccagcacacgtgcaggtgtggagcagaaggtcccacagcagcagccagggctccgattccctggaagagccgcccactgcttctgaccaaacctcacattgttgcttccatgtggagctccctggaagcagccaaacctataaaggattggttacaactgtagatttgattatgtctaactttaatgagattaaaaggaattcattctacattttatgatttgttttccgagttcattggtaatacattgcattagtttccaagggctgccctaaccaaatacacaaactgggtggcttaagacaacagaagtggattgtcttgcattctggatgctagaaccctaaaatcaatgtgtctgcagggctgtgctccctctgaaacctgcaggagaaccctttcttgtcctttccagcatctggtgttgctgggaatccccagggacccttggtgtatagatgcgtcactccagtctctgtgtccaccgtcacgaggctttctccctgtgagtccgtatctgtgtctcttctaaggatgccagtcatgtcattgagttttcatgactgaaaactcttggaacattattcttttttcaaaaggaaataggtcaaaattgtaactggatataaaatacataatggggtgatgatattggagatagactagatttttgctctacctttcttcagcacatttatgtttgatatttaagtagaactgtcttgcacttcaatgtttaatgatggccggtgtctggtattctatctggcacatggcaaacactaaataaatacttatcaattgttgattattattgatcaaccccatattgttggtacgcatacattttgcaattataaacatgaaatatacataatgtttttcaaagatacgtatggttttatgcctaaatttttattgcattaggatgatctcattaggataccacatggatgatagtatgtttcaaaaaaattgtctgttaaaacaaattataattaaaaccattttctaagtgttggctatattaaccagtaaataacaaagacaaaatattttaaaaatctaatttaaaaatcatatgagttctttggttttaaggcatagtaaagcaatgattcacatctttcctttaaattggtcattcttattcactgaagttaaaggaaaacatcttggtaatatgtgcaaatactttcttacgaattatttaaagcaagagttcccaacccctgggccataaaccagtaccagcccgtggcctgttaggaaccgggccacacagcaggaggtgagtggccagtgagcaaagcttcatctgtatttacagcccctctcaatcgctcacattactgcctgggctccgccacctgtcaggtcagtggcagcattagatttcatctgtatttacagcccctctcaatcgctcacattactgcctgagcttcgccacctgtcaggtcagtggcagcattagattctcataggaacatgaaccctgttgtgaattgtgtataggagggttctaggttgcccactccttatgagaattaaatgcctggtgatctgtcactgtctcccatcacccccagatgggaccgtctagttgcaggaaaacaagctcagggctcacattgattctacgtgatgatgagttgtatcattatttcattatattttacagtgtaataataatggaaataaagtgcatataaatgtaatgcacttgaatcatcctgaaaccacccctcttccaccacacctggtcagtggaaaaactgtcatccacaaaatttgtccctggtgccaaaaaggttggggaccactgctttcaaggtagcaaagttttaccctagcacttgaaaaatggtattctgtggtacaacaaagaaaacgagagatactctaagggaagttctgtgtcttctaaatgaccgattaaagaaactaatgaaaagtcactttttgtggccatgaaacatgaatttaagaactattctgaagttggcatccacatagtctagaaaatttttcatctctttcatttcccacattctttacaaagttgtataacagcaaggccttcgagggtcactgaggcacagggcactactagacctctgatccctgtgcggatgctgcctgccacatgcttcactggatgtgaggtgaggaaagaatgaatatttttttcatcaaactgctgagctttttagcccactgtgatttatagtcactaaaataaaacaattcctttatcattcaaatactactgacatctaaattcagactaatacactctaccaaaatcatatcatctggcctgtaacttaagacctacagacatcagttaatttaggaaataatctgatgtgcaaaggaaaaattccatggagagatgacatcctcctctcttctccccagtatgcagggccattcagctaatggggtaagcatttcaggaaataatgtggccctgatatatgtcagtggcaatggaattaaagaggaagagacaataaaaggaaaaatttcaaaagaattgccggttgaagatggatagaatgaacacaaaagttttgagccctggagaggagagtttcagtaccgcggacagaggtttttgccgttgcctacttttccttaggcctccatctatgataattcattctacaaaaataaaaggagtgaattgaaactaaagtgtagctcataaagagtagtagctgtgctacttatttctacagagcatcaaacctaatgctgttgatgttgatacctcttctgaagatgacaaaaataagtaagtccaaaaaatacaccctagtttttaaaacatgaatgtggctgacagatgattaaaacactttcatcaagattctaaaaagcaggtaagattaggttttgcttttacagcattatataagcaaaatcctgcttcgttctccacaacagtgccttcctaaccatgtacatcatatgccaaggtcttcaaagggcccatgctttcttagcatgcccagcatatttaattaaagaattattgaactatggtcaggtgtggcggcttacacctgtaatcctagcactttgggaggccaaggagggtggatcacctgatgtcaggaattcaagaccagcctggtcaacatggtgaaaccccgtctctactaaaaatacaaaaaaaaaaaaaaatagctgggtgtggtggcacacacctgtgatcccagctacttgggaggctgaggcaaaagaatcacttgaacccaggaggtggaggttgtggtgagccgagatcacgccactgcactccagcctgggtgacagagcaagactccatctcaaaaaaaaaaaaaaaagaattattgaatgaaactgaattggaagatgttagtaacgccttccccaattaatggatctttgaaaaaacatataagtagatacagaatgactcagttgttacaggacattttaaacagtgcttcttatatgtgttactccacaggaagtattcaaaaattagagtcaaactcactctcaggaggttgttgtcaactggtcaggttggaaacaagcaaatgtttacatttcctacacactcatatgcttccctcctaagacaggggaattgttcaaaagaacaacaggtagtgctccacagagcaccactgactgctccacagagcaccaacccaaatgcttgggttgaaacatggaaaaaatcaccaaggcctctcactccgagtccacgccccaaacacaaacacacatttctggaggctttctcagatgatgctgtggtcacctcaaaccatgattcaaataaggcagattttgagtttgtgcataaatgagattaaatgtgtgtgcctttcagagtaaatggtgaaaaggaatagagaaaatatatatttctttgtaatgttctctaatacaagtcagaaatcagacctgaaggccaaaaagtgacattatttcttcccctgctgctccccccttagcaccatgattaaagctctaaatttgaaaatgttaccaggggacagtgatattccccagcctcaaaactcaagactcatcatggtggcttagtctggcaattatgtgtattatgcatagatcaccactgtaaggttagatggggaacacagatccatataactcaacaaagaaacacacacacgcatgtaaacacacacacacacacaccctaaaccataaaacagtagagcagaaacacacagagatatctccatgtaaattttaaaacctgtctgctagatactatgactcctttaatatctgctgagattctacatgcaagtcaccttttcctccagtgttttattttaaacaggtaaaaatccacagaaaggttgaaagaatcgcacaaggagcacccacatgatcttcactctggttccccagttgttacaattgtgcattattttttatctttctgtatgcaattcaataccacctttttggccaaaccatcttttttctttttttcttttttttttttgtttgagatggagtctcgctctgtcacccaggctggagtgcagtggtgcgatcttggctcactgcaacctctgcctcccgggttcaagtgattcttccgtttcagcctcccgagtagctgggattacaggcacacaccaccacacccagctagttttttgtattttagtagagatgggttttcaccatgttgcccaagctggtcttgaactcctgagctcaggcaatccacccacctcggcctcccaaagtgataacattataggtgtgagccactgcgcccggcccggccaaaccttttgaaagtaacttgcagatatattgacatttcatctatcactatttcagtgtgtttctctttagaaatgggatattctccatgacaataatattgttgtgctcaaaaatattaaaattaatataatgatattattaaatgtacagtttatattgaaattatctccaaaaatgtctttgtagtttttttaaaatccaggatcaaatcatagattgatcacgctgcatttcgttgtgatgtctctgtagtccctgatgtaggacttccttcctcccttttatctctgaagagtccaggctaattgcattgtaaattttccacaacctgaattttttctgtctcctcatgttagaatcagattaaagccttttgacaagaaagctgcatcgctgttgccaagcagtcttctttgcagcacgttagctggcaggtccatccctcatgaagctgtgtttcatcaactgattaaggtggtgtctgccagacctttccattgcaaaggtccctttctatttctcaggaataagtgatttgggatgtgatgctttcgggctgcacagtcaccccttccccagttttgtcgtccattcagagaccgttgcctgtgcttgttattaaagtggaggttgaaaacagtgattttataattccgtcgtgcctttgtcacaataaatccatcaattattttttagtcgagatgttataatccaatgccatcattattcttccgagtatgccgtttttaaaaatttggtcataggagcctctttgaaccaacgactgtgtcctctctacgtgttcccgctgataactggacatgcccttatttcctggaccaacaaaataccccaggctcatcttgtatgtcgcctgctccagacctggagccagctactgctccaaggatgctccctggctcccttcatcggggagtgtggcttacacaccaagctcaggatgcatgttttcttatgactatgggggtgtcagcctttgaaaccctttcagtggacagagctgggaatttctggggtttagcacatggacacgccactcagaagcccacaacatcatttgaaggtgccttctgaggagtcttcatgccaaccttagctttcgcaccccattgctactcattcttcttccctataagaggggtttctgttctcttccgaggaattccatctatgtgttggttttttgtttgtttattttgttttgtttttacaaggtaagcaaatatataaatatttatttttacttgccctcacttcttacatgaaaggtagcattacacataaatatatccacatgtatacagttgtacctcagggtctgttggggattggttccaagacatgtccctctgcaaccccatatacccatatctgcaactactcaagtcccaagccccacagtcgctcctgtaggacctgtgaatgcagaaagtcagccctataggtgggttttgcatcccgcaagtaccgtgttttccatctgcattgataagtggactcacacagttcaaatgtatgctgtttaaggtcaactgtgtgtagatagggcacagtatgagtatactatacttcatttatagtcttttggtaaaaatctttaaagtaaatcctggaaattacctgaatttcatggagattgtgctcattctttctagggctctgcagtgccccatgcatagatatcctgtagtttattcaactggtctcctatgggtagcacttaggttgttttcaataactggctgtatgaataatgctgcaaggaataatcttgtatttactgtatttatgaaggtaggtcttcagggtaaattactagaaaggggagctctgggttaaagggtaaatgcatctataattttcctataaggccaattttcctcctcaagagtttttccacttttctaccccaagggcactatatgagagtgtgtgttttgtcaacaaagcctggaatcaagctttggaactcctgcaaatctgaggtgaagggaagtagctggagcagttttcagtgcatttttctgtccatgactgtttaaggtgcttgccatgggctatctgtatgtatctttgtccttttatccaggggacatgtacatatagttggacaaagccccttcttcaacttttcccttaagctctgagcccactactagatgtcttcatatgctgttacctgtgcaggtaaaactgccccacccaccgaccagcctcccatgtctgtccaactcctaaccatccacagaaccccacttgaatgcccttttctcattaaaggtttccagatttccttcctctatctcaatctcagattaagtgcctctcacctgggtctcaaattatctgattcaatcttggttaaaattatgtttagatgagtgggctgtctcactgggatttaatgagaagccttgtgtgaaggtagttgtcttgggaatataaaggctttggtgggtggaaaaaatagaagaataggttagaaaacatttacattcctgataccatgcaatttaaagcaaatgttctattctgttaccacaaagttgagttactgtgcagatctttccactgtaaagaacaaagagctttcttataatattgaaaggtttattcccataattccaataaaagctgacttgtaattttgatttatatatatatgaatataacacacatttttccatacttattatagagaattgtgctcattacattttaaactgcatttgttataagacagtaaattgcctccttaacaaaaagtaattaacccacttataatgacctcaattattttgttcaattataattaaccaattactacgttcacacacacactagtttaggaacattatgtaaaagcactcctccttgcctaagttcgctgcaagtaaaaattaacaagtatctctcacagatgaatttttaaacatagcacaaaatagcattttatcacagggagccaagggcagggacaagcaggtgtcttggaatgatgggtccagggctatagggatttggatattgaattaggttaccatattttgtatcacacgctaggcacagagtgagcacataggaattataagtattaattaggataaaattgtataaatgtaaaacacatctagcaaatttgaagtgttatttcgaattgcttagtggctttatttttaaaatatagaggtgatcgggtaacaccgagacaaggatttctctttctttccagcaggcgcaccccaggagtgacaaatcagccttcaattccctctggggaggggcctggttgtcctctttgggtggcttagcagctcaggccctgtgggtgcgcttcacatgcgtggggctgtaggatggaggggtggagaggcaggcaggcagaaacacaggaggcctcactatgtcttcttccagaaatcccggcttctcctgtaaacgctgcagtcagtctccatccttagcctggcacgggtctgccctgtccatgtgcatcctccgtgtgggtgcggtgggccatccctcctcccaccgtaaccacctacgctcccctgggtttcctccccctcacttattccctttcactattgctgtgccccagatttccactcggagccctcatcccttcataatctgtagcctcttccaagacaaacttcccttcactttaaaaaccatgtttgctgaggatgcccagtagtaaggccctgacccttctgtgacctccctcctaaggccgcctacttgccctctccacctgtctattcacaggcatactgaagttaacgttgttgtgttggattccccactcagacacgctcttctctccttcttccccttctcagttaacggcacactcagatgttcaggttcaacactgggcaccatcctgaatccctctccctcagcctcccatcaaatgcgttggcaagtctgacagccccaagcccagcacgcacccagatcctggccctccacctctgtcaccatggacgctgctcgcgccaccaccatccctcctggagctggcctcctgctcctcccccctgccctgtcagtcttgtccttgcagaacagctgcagtggattttaaagaaaatctgactctagcaattccatgcttgacattggtaagggctttacgggctggatatgtccctgcaaacttcctgcattgaagtcccgactcccagcgcctcagaatgtgcctgtgtctgaagacaaggccttctaagaggtaaatcagctaagatgaggccacaaggggaaccctaagccaatctgactggtatcctcatgaaaagagattagggcacagggagacaccctggctttgcttgcgcagagagacaaccaggtgaggacgcagcaagagggtgccccggcaagccaaagagaggtggggtgggaacccaccctgtggacaccttgacttttgatttccagcctccggagctacaaggaagtaactttctgttgtgaaagctgccgagtctgtggtccctgtcagggcagccctagacacagacacaaacgatttccagctacactgagagtccatcccattccctgcctgccccaccacctcccaccaccccatccagctcatggattatttatgtgtctgtctccatccagcagaaaatcaggacaaagatgtggatttgtctgccctgttcaggcaaaggtctatcccctaaagcagtgcctcacacataggggctcagcacgtgttttccaatgaatgaatgaatgaatgaatgaatgcaatcccatgttgccagatctaaggactttccataaggagccatgtaagtggatttttagacagaatgttgtggttcctcagtcataactttttcttggtagaatgacaagtttcttttaaggaagtattccagttcatcaatgaagaagtgctagaatgagggtatcactctttgatcactcctagtgagttattggatcttggcaatcaccaaaactgaagaaaaagacaaccagacatccaaagggcagacgaccccacctgaatattggtgagactctagacccaactgacaaaagacaggagctacatgagacaggggaccatgttcaaggatgcaatgaagaagcaggcagaaagatccagaatgcccagaacactgcaggacagtggtccagtttctttaacaaggcaagaaatatgcaagatgtagaaggagaccacatattaaatgagacttaagaggtgtgtcaaccaaccacggtatatgagcctctcttagagcctgactcacacaaactattacagatcagataactggtgaaagtcaaagacctgacatttgatgatactaaaaaattattattaaattgttatgcactgtattggttttgcagtgtgtgtgtgtgtgtgtgtgtgtgtgtgtgtgtgtgtgtaaagggtgaccttatctttagagacacttcttgaaatacttgtagctgaaataatgtgataataaacttcttcaaaaatagtctggtggatgtgggcttaggggaagagatggagtttaaagtggaacaaaattttctgtgagtgatatttgttgcacagtgggagcaagaaagttcctagtgttattccctcaacttctgcaattgctcaaaattttccaaaataaaagcagaaactatgcagtacaatgaacacggacaggcatttcacaggagaggaatcggacatggccactaaaaatgtagagagaagtgaaccttatttgatcagcgaagttcaatttatccccattcaactggcaaaaagttaaaaggtcttacgataccacatgttagggaagacatagagcttctctgatacgtgggatagtatgctcacgttctgctgttgggagtataaactggcacaaccaatttggaaaaaagcttggcatgctctcctcaaaagtttatgctctccatgtgaattccattcaataattccatacaacgattctataattctatctctggttggttgtgtatgtgtgtgtgtgatgtgtatgtgcttgtttatatgtgtatacacatgtgaatatacatgcttgtgtgtatgcatgtgtatacatgtacacacatctctttgcacccacgagaaactcctgcacatgtacccgaggtgtcatgtataaggacgtcatagcaaatgaatgaatgaagggaggcagcgagggagggctgcccatggagcagagatagagatgtggtatggaccaaccagtactggacctggtgcaccagtgtacagagaagccgccgtgtggggcgactctccagatagcagcctgtccccctggtgcccggcactgcctcagcaggtggcacctgctggggttctcactctgcaagatgcctgggggacatacttcccaacttctctgtggcagttttcacttaaaaggaaacttgaatatttaatccgaccctaagtcaaatccttctgtgctagcatgagggcatgtgtgtgtgagtgtgtctatatgtgtgtgtctatgtgtgtctgtgtctgtgtgtgtgtgtctgcatgtctaatatgtgtgtgtctgtgtgtctatgtgggtgtctgtatgtctgtgtgtgtgtgtgtgtctatgtgtgtgtctgtgtgtctacatgtgtgtctgtgtctgtgtgtgtgtgtctgtgtgtatgtctgtgtctgtgtgtatgtctgtatgtctgtgtgtgtgtctgtgtgtctacgtgtgtgtctgtgtgtgtgtctgtgtgtctatgtgtgtctgtgtgtgtctgtgtgtgtgtgtatgcttgtgtgtgtatctatgtgtgtctgtgtgtgtatgtctgtatgtatgtctgtgtgtatgtgtgtctgaactttgtgaaaagaggcaatcacatcaggacagttgcaggccacagcgttctgtgcttcaccctgtccggggtgctaacttgaagccatgagcggagcaccccagggagctgccttcccgtccgtcttctgcctccacccacacagcagtgctgcagagcgctgttcttccacgagggaatagcagggcctctaaaaacccttttacaaatgtcgctttcatgatcaggaatccatttcaaagccagagcagagcgggctccccacaaatgggggctctgagttgaggggtgctggatgctgaggggagggggcaaaggggagtgatcccatgagtcccgagaataaaaggcagggctgatggtgccgtgactgctgggaatccagggtacccgtggctgtgaggggaaggcgactattctgaagagaataactttaacctctcattcccaggtaacgcctggagttgaggaagaactcgggcttaggggaagaaatggagtttaggtggaatacagcagagagggacccctgggcaggcctgcttcccctgacatgacccagatcctggcaaatcattatagtcccttcagggtgctacttagctacttaccctagactgggtagcttagctacttaccctagactgggtggcttttaaacaacagaaatgtagtggtcccaggtctggaggctggaagtccaaggtcaaggcaccagcagattcagtgttggatgagaacccacttcctagtacatagacagcaacttctccctgtgtccccggtggtggaagtggtgagggagctttctggggtctcctttataagggcactaatcccatgaatgaggctccaccctcatgaacccatcatctcccgaggccccacctcccaataccatcaccttgagggttaggatttcaacacgaattctgggagagacacaagcattcagaccacagcacagatgaaatgtccacagcaggaaggaacagattcctccactgggctgtcatctgagctcctgcctttcacgtcaacatttgtgagtagaaagtaaagaaaattggatcaaattaacctgaaagaatgaaccaaggcaagcacaacaatgagtcattagaaaacacttcgggcataaatagatgttctcttttggcaaatttcctaggttggtggatattttaagttttactaagaaaaacaaatgtaaatgttattaagcggctgggaaaaacaaagcatgtgatatatttttcacacatttttctttgtcctcccattaaactctatgttcatatgtagtttatattttacatctaaaacttgataggatgtttttcatttgttctgagaaagtggaaaagtagaaagatacgtttcccattgccacaccttagctgtttttaaaatgttctcttctctcacacacaatcaattgaaagagccctttcctttttcctaggacgtcctgagcactttgctcacactgtaggactcaaaaagtctgggccatgtcctgggatgacctaaatcagattcaagtcatccacagcgctgcttggtatgtgtgcaattcaagggagaatctcccacacacctccttgcagacaactctgagatttggctcttacaaaagattagttgggtaaatcactgttacaaaagattgccagaaagatgcgcttttctacggattataaaattgtcccctgaattaagctaggcttaccatagctagggtaccacgttgcctcacatcccataaaactgtcttcattgacctcgattttgccattatactctctgtttacatttatggaccctataagagggacatatatgaaattcagtactagatttagtatagggcttggtctactggattattgagggtactcttcatgggaagatacaggaataattaacctcagaccatagttctcagaaaggctatatttcttgtgttttaatgtgcagatgctatgaattatataactgattatgtttctcattttactgaagcctctagaaaggtcagggttgaattccaagcctacctttaacatagaagcagagagtagaattgtggttagtaagggtagggaggtgggggtatggggagaccttggtcaaagagcacaaagtgttagttatgtaggatgataagttgtaaaggttgttaaagttgtcagaataaaaatggagtcactaaagttaagaaaaccttgacaaatagagctggggaaggccaagaagaaaaggttctcaggcttgtacacctgataatgaaaaagactttacaaaaaccacaaccttgcacaaaggccatcacaaccttatacaaaaaaaaaaaaaaaaaaaaaaaaaaaaaaatgcttctggaaggacacctgccccgaaactgcctgtccaacctcggactgtaggaacaaaacgtgatgtgtatatatctacaatggaacaccgttcagccttgttattgatcttgtggccaagaataattattgcaaaacaattatgtaatcctcctcatttttttctttaaacacctctgtctttatctcctgaatatatacatagtttactatggcacatgtattcccattgcaatgctctactcgcaaataaacattttcttttagagagccactgtctgttattaaggttggcaacatctaacacacagcatggagaacacggttattaacattctgttgcgtactgaaaatttgctgagagtccatctcaagtgttcccaccaccaaaaacaaggtaactgtgtgaagagatgggaagtgaattagactgtctgttgtaatcagaatacgatgtgtatggacatcaaaacctcacactgcgtatcttaaatataacaatttcaacacaaaatgtgaaagcaaactgtaaggataggctggtgcactttgatctcttgttttatgctctgccttcattgttctgtacccttaatcgggtttttagtttcagtctattgtgtgagaagcattttaaattaataaggtgcctcaacttcctcttggaatgtagattgggtgtaaacatacatctgtaaatacacatatattctgttagaagagatggcaatcagctgcaggtacctgacagaatttgctacatcaaaccacagaaacatgctggaggaaaaagtaagtacaaacccatggatgagatctcatgatggagacaattacacctcagggtcagcatggggcatgggcatcccacctgttccctcccagcttcagcacagtgctgtggcctcagggagtcctctgatggccacaaagtgagcacagaatcagagcccagtggtcagaatggcccggaaggtgaacctgtcacctgcagagcctcttctgaaagacctgccctcctttccccttcctccccaactccacacccgccaccttcctgtggggacagaattcaggcaagactgccacgccagtccccagtgctaaatgacaaaccacgttgggctcatgccgtatctgccctttccttcacccttccttccagaattcttttgctcttaatatttctagggtagaagtagagcaagtactttatctatgggaataaatttatcacataaaaatctaacagagcttgagatataaatgtattcagtgtgccttaaaagtggtatcactgactcatcaaattgtcttgtgaaaactggatatcaagatgcaaaagaatacagttggacatactctatatcatacacaaaaattgactaaagatagatgaaagacctaaatgtaagacctacaactataacactcttagaagaaaagatgagaaaagctttatcacatcagatcgggtaatgatttcttggatatgacgtcaaaggcacaggcaacaacaacaaaaaatagataaatcagacgtcatcaaaatgtaaaacttttgtacatcaaaagacacaattaacaagatgaaacaacaacccacagaatgggagaaaatatttgcaaatcatatatcagataaggggttaatatctggaatgtataaaaacctcctacaacttaataacctcaataacaataaaaaaccaaataacccaattaaaaaatagcaaacgacttgaacaaacatttctccacagaagactacaggtgaccaataagcacacggagaaacgctcaacatcacgaatcatgagagaaatgcaaattaaagccacagtaaggcaccacttcactcccattggtatagctgctatcaacgaagcagaaaatagcaaatggcaaggatgtggagaaactgaaacctttgtggcactactggtggaaatgtaaaatagtatagctgctgtggaaaacaggacggtggttcctcaaaaacatttaaaaatgaattatcggccgggcgcggtggctcacgcctgtaatcccagcactttaggaggctgaggcgggtggatcaggaagtcaggagatggagaccatcctggctaacacagagaaaccccgtctctactaaatatacaaaaaattagccgggtatggtggcgggcgcccgtagtcccagctactccagaggctaaggaaggagaatggcgtgaacctggaggcggagcttgcagtgagccaagatcgcgccactgcactccagcctgggcaacagagcgagactctgtctcaaaaaaaaaaaaaaaaaaaaaaaaaaaaattattatatggtccatcaattcccctgctagattgaaaagcagagacttaaacaggtatttgtctacccatgttcacagcagcttgactcacagtactctgaagatggaagcaacccaatggtccatcagcagacgagtggaagaacaaaatgtgatgtgtatatacctacaatggaacaccgttcagccttaagaagaaaaggaatttgtctgggtgcagtggctcatgcctgtaatcccagaactttgggaggcagaagcaggtggatcacctgaggtccagagttcaagactagcctggctaacatggtgaaacctcatctctacttttagtatttttaatttttaatacaaaaactatctgggcgtagtggtgggcgcctgtaatcccagctactccagaggtcaagggaggagaatcgcttgaacctgggaggcggagattgcatgagccgagatcgcaccattgcactccagcctgggcaacaaaagcaaaactccatttcaaaaaaaaaaaaaaaagaaagaaagaaagaaagaaagaaaagaaaaggaattttcacacatgctacaacatggagcccataaccttgaggacattacgctaagtgaatataccagttgcaaaaagacaaatgctgtgtgattctgcttacatgaggtgcctagagtgtcaaaattatagagacagaaagtagaacagttgctgtctcattggggaagtggctgagggaagtggagaacagagagttggttagtttttaacaggcagagagtttcagtgttgcaaaatgagaagtattctggaggtggatggtggtgatggttgtacaatgatgtgaaagccctgaatacctctgacatacttagaaaccgttaagatggtacattttatatttttataatttctttttaaaaaaagctcatcgctgatacaaagtataaaacatctctcccaatacatgcacaagaaatgacacatgcagagttcatggacaatttcctacgaggcaagggaagtaaggcctgccctctaaatctgccttagcgtgtgagcccacagctttctgctgtgggttctgacatttctcatcacaccaagcgtcagtcctctcagacccagatctgaaagcgggggctgaaacctgtgttactgccttagctgtcatctccatggctgtgtgggatcccagagccacagccttccgtcctggcactgtgttgatttttaaggccttttctttgagatttgggacattattgtttcctctttcccagctcccccctatcaagctagagccctgaccattaggcactctggccagacccaggctctcccttgggctgggtcacacgctgtggttggggagtttcttctgcaacgaaggcctccctggacccctgactcaccacgcatgtggccaaccacacctctgagggcctggagcccagaccctccagtggcagggggtattgggtccatccacggagagaacccctgatggaagaggcgcctccctcctgggccatccacactgacaatgcagctgctccctgcccccacctcctcctccactctccgcaggtgttggtcctgcgcacctcactaaacttgctcagaggcaggttcctcagaggctgctccacgcatccaggaccggaggcctcaccagggatcccttctcagatccttaccctccctgccatctctcttctgctcaggtccacagtgggtccgtggccatgatgactatggagcttctctacttcaacttgaatttgcccttccttcaaccactctgtgtatttctacaccagcatgacaccttcccccctgcccctgccagacagaaagcttcagctgtaagggcagtgaggaccaagacactcttgccttgtccgcacctcttcacaggctccttcttcccacagaggaaggcttggcccccactgagagacgctcccttagggaacaggtgctgttctatttccatgccgcatttgccctcaccttccctgggcctgggctcggtagcaaaagaccacagagagaaattccaaaactgagaataaaaactataacaggaaatatttttaaacaaattgtattttaccacatctacatacatacacacaataacagaattacatactagatagatgatagatacatagatagatgatagatagatagatgatagatagtagacacatacataggtaatagatatatagatacatatatacatagatgatagacagatgatagatggatagatagatgatggatggatagatagacagatgatagataatagatggatggatagatagctacatagatacatacgtagataatagatacacagatatatggatgatagatacatatatacatacatgtatagatgatacatgatagatagatagatagatagatagatagatagatagatagatagatatagataatctacagtagtgagttggttgcatgttatgaccgaggaagaatataagatgcgtaccagatttctgatttggccttgaaagtgacctgggagtatttttaatgaagtaaacaggaagaaagtggctgatggtgttggaatttgcctggcctgggaggaagagctgagttaggataagaggagtgggatttggacacattggctgtgctgaggaagttgggggggaagctccaggctctcagcacatgtttggatttactcacagatgcacagatagcagaggctgagctggattttgaatccagtttgaatctacttctgacagaccccagagcccaggcttggaaccccaggcaatactgcccctggctacaccaagatattactctagagacaaaaatgcaatacacttttaagtataatagccaaaaatggaaattctgttggtgttttctctatggtaagtccgctcatgtcaagagaaactaactccatcttgaaaataaactttctgaatccctctcttaagaagcatgctgggaggtcgcagtgccccacagtttaaatgttaggaaatgcaggagatccagaaaattgacagatttattactaaatgtttacttttgatgttcaatgtcattaatttgatctaactggggaaattgtcagaattagcgaagatcatgaatcactgaagtatatttaaatgtcattttattacttccaagcactcataattaaagaaactaaatgttagaaaagaattgagccaagactttaatcacgataccttaaagagcaaattttaattataatgttcacattaaaatgtctcattgcaaatagatcttgccaatatgtttgaaagcagcttgctctcttatgtaaatgcagtttaatttgcttaattaagatgtttagcaactttttctttcataatacaaataatcataatagcagacatttattgagtgcttactgtgtgcccacagttagccaagcacttgcatggtactaccacatttcatcctcacaaccatgaagaaaatacaaatattatcctacacgtgatgaaacaagcttagaaaaggccaaagtggtgaaatagactcacagccaggtgatctgatggaagaaaccattcttagccaacaaaggaaggcatcaggaacaacaaagatgaaactgtctacatctacattaatagaatccaaagcaagtcagtctataactgaatatggacttttcctttatgatgtaatatttgaaactgtaactccctagagtttatgtttttctaagtcagatttattgaagtttaatttacctacaggcgaattcacttcctttaagtgtagagatcaatgaatttttacaaatttgtacagtcatgtaaccatgatgacaaccaaggcatggcacatctccctgccctaaacgcttccctcatgtccctttgtcagtttcctccggcagcccacacatcctggacaccactggtctacaggtagaagtggagtatgcaatacatagtatttgggcctggctgctttccttcagactaattcttgtgagatgtacttgtgttgctgcagtcacccctggtttgttcctttcattgcagagaagtgtcccaagtttagacgcagaacacaatctgtttatctattcacgagtttatcatttgagcaggttccagctttttgtgattatgagtaaactgctgtaaatgtccacattcaggcattttcatggatgtatgtttttattccttttgcataaattccttttcttctttctttctttctttttttttctttttttacagggttggggtttcactatgttgaccaggctggtctcaaactcctggcctcaagtgatcctcccatcttggcctcccaaaatgctgggattacagatgtgagtcaccatgcctgtccccttttgcataaatatctaagggtgaaagcattgggttatatggcaagggtatgtttaactataaaagatgttgcccaactattttccaaagtagctgcgtcattttgcattcccaccaacaacggaagagagttccagttatttcacacctttgtcagcacttgatgctgtcagacttttcagttttagctactctagtaggcttgtatcagtatctcacggtggttttaatctgcatatcctaaatgactcatgatgttgagcatcttttcacacactcatttgccgttctcatgtctttgttaaaatgtctgttcagcaggaacagaaaactgaataccacatgttctctcttataaatgggagctaaatgatgagaagacatggacacaaagaaaagaaggaacaacagacgttggggtgtatcagagggtagagggtgggaggagagagagaatcagaaaaaaatattgggtactatgcttagtacctgggtgatgaaataatgtgtaccacaaacccccatgacacaggttacttatataacaaacctgcacgtgcagccctgaacctaaagtaaaagttaaaacaaaaatgtctgtttaaatcttttgcccatttttattgggtggttgtcttcttattttctagttgtaagagttcctgatgtaatccggatataaatcttttatgaggtatgtgttttaaaaatattttctcccactctggccagtatttggatttttctgacagtgtcttttcaaggacaggagtctttagtttgtatggcgtcctattatttatttatttatttatttatttatttatttagcagttcatgccttttgtgccatatctagaaaacttttgcctaaaccagcgatgatttattctatcagtgttattgttttaggtcttaaatttaggtcaatggcccatttttagttacttttataaacaatgcaaacaccaaggcttatctttttgtttataaatatctacttgttcaaacaccatttgttaaaaagataatctttcccctcattgaattacaccgacatctgtgtcaaaaatcaattgaccacagtgtgacagtctgtttctattcattccattgactatgtctacttttatgccaatactgtactgtcttgatgaccacatcactgtagtatagctttaaaagacagtgtgagttctccaactttattcttctttcgcaaagttctttgggttattctacatcctctgaacttctgattaagtttaggaatctgtttgccaaattctgtggagattttgattggtgttgcattggattctcaaaatcagtttggaaaatcagcaccctaacaacactaagtcttctgatcatgaccttagcctgcattattcatttagaacctccctttaagctctcagccatgttttgtaattttcagtacacaaaccttgcccatgttttgtaatattgggatcctactgtatgtcattttaatttcaatttctcatttttgtttcctttataaagaaataaaaaattgactttggcatatttaccttacgtcctgcaaccatcctaaacacgtgagtcttaatagctgcttttgcagataatttggaatcttctaggtaaatagtaatgttgtatgaaaataaatgcagcttgctttcttcctttccaatttgtataacttacatttcttttttaccttcttgcactaccaataattttcagtataatgttgaatgggagtggtgcaatgtcctcatctgaaggcaaaagccttccatctttcacattaggtgtgatgctggctgtcagctttttgtagaagcactgtatcatattgaggatgtttcttttttatccataatttttagaattttaggagaaatagatttcgagttttctcaagtgatttttatgcatctattaagatgatcatgtggtttttctctttagtctgttaatatggtaaattccatgcatttattttcaaatattaaaccaaatttgcacttgctggaataagttctacttttttatgatgcattattctttttgtatgttgctggattcaatttgctaatattttcctaaggaaaatatatattattttttaagtgtatatttaggagagacatggtcctatagttttctgtttttgtttttgtttttcttgtaatgtctttgcacgggttttagtatcggggtaattttggcttcataaaatacttcctcctcttttattttctggacatatttgtgtagaattggtaatatttcttccttaaatgttcgatagaattcactagtgaattcaattagtctgaaaacttccttgtgggggtttttaacaacaaattaaaaacctttaataaatataagactatacagtgagtaaatatacatgttaattattttctatttttctacctccaagttttctgatttttttccacttctgtgcccaatgtattaatcagctcattacagaatacttcacctctggtatcacttctgaaggtttctaaacacagccatgtgacttatcttcatcgctttcccctctgtgctaaaactcagtgtctcctcacacacactgtccactctttctggtagatctctcatcatatttattatagttactttcaagtctcgtctgttggttctagcgtctgggccagtctcgaggacaggttggcttttgtttgtttgttttggtatgtgtcttcgaattgttaatcaaatactgggtatggtgagtagaggaacagcaaaggccgagatgactttaaattacacctgcacccaagctggcccacctcggtccctgagccgggatttgtcttgtcaggagctgaccaggcctcgctgcttggtctttgccttcagtgtgccccgtcttcagtcccgctcgggcacctgcagctgagcttctcttgggacctgggacctggcccagcacagcgggatttccagtacccgctgcaccctcagcgctgagcaggtgccgctcacctggccacagccggctcttcactgcgtgccccgcccgaggaagaccgacgctgtccattcttgctgggaggtgcgtggtgaggccagggggctccgaggcctcctgtccagcctgtctcagaggcagcccaaggacccaggcctcaagggtctggggtgggagggcgccctgcccacccccacggagcagccttctctaggctctcccagcccttccccggggtggaaggctcggccgctccctgacccctggcctcagcagcccttccctgggccagaggccacactgcagttttctcagctcaggctcactgtggagcaggggtcactccggaccctctcagagctcccacctcttccccgaagcagggccttccccctcccactggctaagggctctgtaccacaagagggaaaaggcgaccgcagggtggacctctgtgtctgtccacctgagggctccccgctcctgcctagcccccagtcccctccccctgcgagaaggctgcagaggacactggagtgaggatggccccgtggctggggctctggggtcctaggctggtgctgggcccacacccagctgtgtcctcatcacctctgtgggggtggctgtgtcttccacccgccctctgcccctcccgggctccccacccttcaggctgccacctggccgccctgctcccgataagttcagggaaggtggggttcccagatgacctggctgggcttcattgcaaaccaggttgtcactgcgttctaagtcctaggcataactggaagctttttgttttacttggttggttgtttgctttttaccaataatctatccaaatatcttctacggaatgaaaataaagcttgcacatggaaatggaaattaagaaacagaagtttttctggttcaaaatgagcttgacagttggtttgacttctgtgtctgagacacataaacgcaacgcaggctctgcatgagcacaggctccttggcaaaagccccagatcacaaagtcaaagcccttactggctcacagggagcacctgagtcatgggctgaggacctcaggcttgaaagccctgtaccagccggtcagcggctaacattatttgctaaaattaacagttggaaatcaatgccttgtccaacagaggtacaattgagctataattgattcaaggaagtaaaataacactgaagaagggtggtcagcctctaacttacaaggtgaagtgcttccgaccttcctaacgcaatggttctggggaaggcaaggatgagagtgtcagcgtgtcaatgataatagcattgtgcttatggaggaaaatgtatttatttttcagagagccatactgaaaaatttaggaatgaaatgttatggtttatatacatcaccaaaaaaatacttgagcaaaaaatattcacaaaaaaatacaaatataaaacaaaatcaaaaaaagtttatctagtccacgttcaaagtcccccaattgtccaaagaaatatactttactgctggtttcttcaaatcagaatggaaccaacaagtaaatgttacattgtattatcatgtccctacgtgtcattaatacacagcagtccttcccagtcttttgtgtcagtcttgttttcttgcaggtagaccaggtatcctcaaggcctcaccactggaggactcggaatcttggccgcaaagatactaacagatgtccacgtgataagccccaggacctgtgagaatggtatgcggcaaaggggctttgcagctttggacaaacaaggaggaccaccctggattttctatgtgagtttaatctcaccagggccctcataagaggaaggcagcaggtcagagtcagaggacgagatgtggccatggaggtcgggatggatgggagtgaggccgctgcaggaaagggccgtgagcaaaggagtactggcacctctggaggctggcacaggcaggaagtgggttctggaaatgaaacacagcctctgccaactcctcgatcttaggatctgtgccctccagaaccgttagacaaccagtgtgtgttgttttacaccacaacgtttgtggtgattagttccagcagccagaaggaactcacagccacccgctgggggacccgcgcgtaagtcatggtgttccccccttgtgtctttattgcttttttcctgtaattagctggttatgttcaaagtagcttcctgcattgttccgtgaattcatggctatatattttatactgtgatgatcacgtctcctgcacatcaaacacccaaaaaccagaggacttgtcattcatcactgcagtgtctacgtggccttttccaggatacgttatgaagaaatgtttgttagataaataagtgagtaaatgtgtactattgatgtagcaacttttaagggaagacattagaataagggggaattgagccttaccatatctgaggggttagttactgtatatttatcattattttctaaatgtaaaatgaaatggactcgcttcttgtttataatgggggctttggaatagtatggttcaccaatgtaaaaatagatgccatcccaatgtagtcacaagggtgcttataagagggaggtggaaatcagagcaggagaggagaggggaggagaggagaggagaggagaggcggcactggaggctctggaggcgcagcacagggcctccagccagggtatgtggacaaaggcccagaaatgggttctcccttgggcttccacaaggaaggcagtctgctgatgcctggatttcagcccagtgagactgattttggacttctgctctcaaaagtggtaagatgataaatttgtggacttttaaaattaactaaaatagaaaaggacaaaaatcgacctctccaataggtaatgagttcaactattgaatgaaattagtattattccatatatatatatgtaagcaataagcttagtgttaacataaaaaatagatgccataatgccacttgtttgcaggaagtaaaaatttgaaagtgaacactggaaactgttctgcaaagctgcccccaaatgactcctttgctcctaaaacagacctccagctgctgtgtgcctgtggtcttgctccttgatctgcagtgtcctgcaccatccacactcaagcatgctctggcacctgggcaccaagttcctgcaaagcctgtgagaaatccactggaccagaacctgaagttttatcaaagtcttggtggtttccatgcacagcaaaaagaaacagacttccaggctttcatgtgagagtgcgacggccttcctctctctacctccccacgagtagagctgcccggggaccctctgtggctgaaaaacagagaaagtttgcctggcacagacacattccaggactgggcaaatggtttggggagctggttttcaaatgctcctttacaaccctctaggaaaacaaggtgtggtgctttcctttcctcgccatttctccagcagcactctgaggatatgcaatgctagacagcacgtccttactgtaacaaaatgccagtgagttgtgtcctgagcccaggaggcttaactaatcactaaccttgaaatgtaccatctcacattgtttaaaaagaaagctgggccgggcgtggtggctcacgcctgtaatcccaggcttaggcgggcagatcacctgaggtcgggagttcgagaccagcctgaccaacatggagaaacactgtcactactaaaaatacaaaaaattagccaggtgtggtggtgcatgcctgtagtcccagctactcaggagactgaggcaggagagtcacttgaacccaggaggcagaggttgcggtgagctgagatcgtgccattacactccagcctgggcaacaagagcgaaactttgtctaaagaaaaaaaaagaaaaaagaaaaaaagaaagctgaggctgggtgtggtagctcacatctgtaatcccagcactttgggaggccaaagtggtaggatcacttgaggttgggagttcaagaccagcctgggcaacaaagcaaaccctgtctctacaaaaaataaaaaaaaaaaaattagccaggcagctactcaggaggctgaggcaggaggatcagcagagcccaggaagttgagggtgagattacaccgctgcactccagcctgagtgacagagtgagatcgtgtatcaaaaaaataaaaaatgaaaaataaaaacctgaatatccctggtgcgttaaaaggaagatactgcattctagtaagagtcaaggccatgtctgcagcttcagcgctgacgcgtgcttcttgccatgctgagccaggcaaagtgcgtgctgcacctgctctttcaaagacagtggtcccagagctgacgatgagctttttccaaagcctgaagatgaaagtgtcagaagaatactgtatgttttttcaaagttataggagggtaaggtgagaacacaagaacaaaaacttaattgcagaggaaaaatagaaaaactcagcaggtctgagatggcagctctgatctagacacagcaggtgctgcacccagcctccagaggcccacagccgaaggcctgcagaggctgagtcagaaaggacctagtgattgcacttcactgctaaggaaaaggtgagagggggctgacagcaagtaatgggacctgtgtttcattcctcccttttgacatggtatgacggtaacaccccgtgaccactctctaaagagatgaggaagaggccaggagtgaggcttgtttggtagaggacagagggtctgatacaaaatcaccctaaaatattctctaatcaccaattggtccccgctatgaccaggagtttgtggtggcctcaggtcttccctaagggtcaccgtgattctggtgcccttggacaagcctcaagcaggatctggcatctctcgagcgaacaaaagccagtgcccaggcagcagggaggcctctacacacctccagcggtagtagaagcaaaaatcatgataaaaaatcaggtcagcgtgcaactcatcgattttggctcatgccccaaaaagcaggttctctcgcaaagactctgagaccctgacccacaacgccaaccgaacgggggttcccaagcacagtatctgctaggggtcgaattatgctccccaaaagatacgtgagtctccaacccccagtccctcgaaatgtggccttgtttggaaatagggtcattgcaggtgtaataagatgaaagtcgccagggtggccctgatccaatataactgcgttcttagaacaccatgtgaagatggaggtggagactggagagagaatcccaccagccaaggaacaccagaggtcaccagcaaagcacagaggacagggagaggttgggacaaattctcccaaagagtccccagcagcagccagccctgtggatgctgtgatcacagacttccagctccagaacggtgagggagtgaatttctgctatttaagctgcccggtgcatggaactttgttgcaaggctccaggagactaatccagcactgaagccagaggggctgtatccataacggacccgaagggctttcaaatctcttctgtgagcatcacgtcccacaacttgtgtctccggccagctccgtgcttcttagcccaatacccagagttacttatcttaaaaatacagacagggaaaatggagattaagatggtggataggaggcaggactggcttgcagctcctgctggaacagacaaagcagcatgtggagagacccacatcgtgaacttttgttccaagaactaccacagcaacataccaggaaagcctagagaatccacggaccctttgaaggaactttatcgctgctgcaggctccatgagacgctgaaaaaccgtgagtctgcctgccttctcagtggggagggcaagttctcagcccaggtcaccggctgcctagaaatagactcggtgctgttgggggcacagtgggagtgagaccagcctttaggactgtgggctgcatgggagcagggtgaggcctgtgaccgccgcctttaccccactttcctggtgatctgtgtgatgcagcagaggccccctgcgaacatagctccattggcctgggaatcacacccccatcccccacagcagccacaccaaaccctgctcaaggagaatctgagatcagaaacacctaaccctgtcccacctgggggtctttctctacctgccttggtagccaaagacgaaggacataatcccttgggagctctacagccctgaccacctctggagaaacctgaatacttcaaaggtgacccaagggcaagcttgtcttctccctgtacaacctcagctgatgcactcctgaaagcaccacctcctggctggaggacaaccaacacaaaaccagtgcactgaacaaaaacacaaccaaggaccctcatagagtccacttcactccctgctacctccactggagcaggtgctggtatccacagctgaaagacgtgaagacggatcacatcacaggactctttgcagacgttcctcagtaccagcccagagccagtagctctgctgggtggctagatccagaagagcaaaaacaatcactacagttcagctctcaggaagccccatccctaggggaagggggagaacaccacatcaagggagtaccccatggaacaaaagaatctgaaaagcaggtcttgagtcccagatcttccctcagacatagtctacccaaatgagaaggaaccagaaaacaattctggtaatatgacaaaacaaggttctttaacacctccaaaagatcacaccagcacaccagcaatggatccaaaccaaaaggaaatctctgaattgccagaaaaagaattcagaaggtcaattattaagctacttaaggaggcaccagagaaaggtgaactccaacttaaagaaataaaaaaaaacatgttatacaaaatgaaaggaaaattcttcagtgaaatagcataaataaaaaaataatcacaacttctggaaatcaaagacacacttagagaaatacaaaatgtgctggaaagtctcagcaatagactcaaacaagcagaagaaagaacttcagagctcaaagacaaggctttcgaattaacccaatgcatcaaagacaaagaaaaaagaattttaaaacatgaacaaaagctccaagaagcttgggattgtgttaagcatccaaacctaagaataattggtgttcccgagaaagaagagaaatctaaaagtctggaaaacatttgagggaaaaatcaaggacagcttgcccagccttgctagagatctagacattcaaatacaagaagctcaaagaacatctgggaagttcatcacaaaaagatcattgcctagacacatagtcatcaagttatctacagtcaagatgaaggaaagaatcttaagagctatgaggcaaaagcatcaggtaacctataaaggaaaacctataagattaacagcagatttctcggcagaaaccctaccagctagaagggatcggggtcctatgtttagcctccttaaagaaaacaattatcagccaagaattttgtatccagtgaaactaaacttcataaatgaaggaaagatacaatcttttccagacaaacaaatgttaagagaatttgccactaccaagccagcactacgagaactgctagaaggagccctaaatcttgaaacaaatcctctaaatacaccaaaatagaaacttcttaaaacataaatctcacagaacctatataacaataacacaacaacaacaaaaaaaacaaaccaaggtattcaggcaacaaatagcacaatgaaaagaatagtacctcacatctcaacactaacattgaatgtaaatggcctaaatgccccacttaaaagatacagagtagcataaacttaagataaagaggtggaaaagatattccatgaaaatgcataccaaaagcaagcaggagtaactattcttatatcaaacaaaacagactttaaagcaacagcagttaaaaagacaaagaaggacattacataattataaaagcagtagttcaacaggaaaatatcacaatcctaaatatatatgcacctaacattggagctcccaagtttacaaaacaattatgactagacctaagaaataaagagacagcaacacagtaatagtgggggacttcaatactccatggacagcactagacaggtcatcaagacggaaagtcaacaaagaaataatggacttaaactataccctacaacaaatggacttaacagatatttacagaacatcctgcccaacaactgcagaatatacactctactcatcagcacatgtaacattctccaagatagaccatatgataggccacaaaacaaggctaggtaaatttaagaaaatcaaagttatatcaagtactctctcagaccacagtggaataaaataggaaattaactccaaaaggcaggctcaaaaccaggcaaatacatggaaatcaaatagcctgctcctgaacgactgttgggtcaacaacaaaatcaagatggaaattaaaaaattatttgagctgaacaataatagtgacacaacttgtcaaaacctctgggatacagcaaatgcagtgctaagggggaagttcatagcattaaatatctacatcaaaaagtctaaaagagcacaaatagacaatctaaggtcacacctcaaggaactggagaaacaagaacaatcaaaacccaaacccagcagaagaaaagaaataaagatcagagcagacctaaatgaaatagaaacaaaaagaaaatacaaaaattaaatgaaacaaaaagctggttctttgaaatgataaataaaatcaatagatcattagcgagattaaccaagaaaaaaagagaaaatccaaataaactcaattagaaacaaaatgggagatattacaactggataccatagaaatgcaaaagatttttcaaggctactatgaacacatttatgagcataaactagaaaatctagaggagatggataaattcctcaaaatatacaaccctcctagattaaaccaggaagatatagaaactctgaacagaccaataacaagcagcaagattgaagtggtaatttttaaattgccaacaaaaaaaaagtccagaaccagatgtattcacagttgaattctatcagacattcaaagaagaattggaaccaagcctattgacactattccacaggatagagaaggagggaatccttcttaaatcattctatgaagccattatcacccccataccaaaatcagggaaggacataaaaaaaaagaaaactatagaccaatatccctgatgaacatagatgcaaaaatccccaacaaaatactagctaactgaatccaacagcatatcaaaaagataatccaccatgatcaagtgggtttcataccaggaatgcagggatggtttaacatccacaagtcaataaatgtgatatagcacataaacagaattaaaaacaaaaatcacgtgatcatcccaatagatgcagaaaaagcatttgacaatatccagcattgctttattattaaaaccctcaggaatattggcatagaaggggcattcctgaaggtaataaaagccatctgtgccaaacacacagccaacattatactgaacgaggaaaagttgaaagcatttcccctgagaactggaacaagacaaggatgcccactttcaccacttctattcaacatagtactggaagtcctagccagaacaatcacacaagagaaagaaatcaagggcatccaaattggtaaagaggaagtcaaactgtcactgtttgctgataatataatcgtatacctagaaaaccctagtaaagaggaagtcaaactgtcactgtttgctgacaatacctaaaaaaacctaaagactcatccaaaaagctcctttaactggtaattgaatttagcaaagtttccagatacaaaattaatgtacacaaatcaatagctctgctacacaccaacagtgaccaagctgagaatcaaatcaagaactcaaccccttttacaagagctgaaaaaaaaaaccttaggcatatacctaaccaaggaggtgaaagacctctacaaggagaactgtaaaaacactgctgaaagaaataatagatgacacaaacaaatggaaacacattccatgttcatggataggtagaattaatattgtgaaaatgaccatactgccaaaagcaatctacaaattcaatgcaattcccataaaaataccaccatcatttttcacagaactagaaaaaacaattctaaaattcatatggaaccaaaaaagagcccacatagccaaagcaagactaagcaagaagaacaaatttggaggcattatattacctgactccaaactatactgtaatgtcatagtaaccaaaacagcatggtacttgaataaaaataggcacatagacaaatggaagagaatagagaatcaagaaataaagccaaatatttacagccaactgatcttcaacaaagcaaacaaaaacataaagtagggaaaggacaccctattcaacatatgatactgggataactgcctacccacatgtagaagaatgaaattcattcttcatctctcaccttatataaaaatttactcaagatggatcaaagacttaaatctaagaacgtgaaacaacaaaaattctagaagataacattggaaaaacccttctagacattggcttagataaagagttcatgaccaagaacctaaaaggaaatacaacaaaaacaaagataaatagatgggacttaattaaattaaaaagcttctgcacagcaaaagaaatgatcagcagagttaacagacaacccacagggtggaagaaaatcttcacaacctatacatccaacaaaggactaatattcaggatctgcaaggaactcaaacaaatcagaaataaaaaataaacaatccatcaaagtgggctaagaacatggatagacaattctcaaaagaagatatacaaatggccaacaaacatggaaaaatgcttcaacatcacttattatcagggaaatgcatatcaaaaccacaatgcaatatcatctcactcctgcaataatgcccataatttaaaaaatcaaaaaataatagatgttagcatggatgcagtgaaaagggaacacttttacactgttggtggaaatgtataactagtacaaccactatggaaaacagtgtggagattcctttaagaactaaaagtagatctaccatttgatccagcagtcccactactgggtacctacccagaggaaaagtcattataccaaaaaatacccgcacatgcatgtttatagtagcataatttgcaaatgcaaaaatgtggaaccaccccaaatgcccatcagtcaattagtggataaagcaactgtggtatatataccatggaatactactcagccataaaaagaatgaagtaatggcattcactgcaacctggatggaactggagaccattattcttagtgaagtaactcaagaatggaaaaccaaacatcgtatgttctcactcataattgggagctaagttatgagaacacgaaggcataagaaggattcaacggactttgggaactcacgggaaggggtgggagggggatgaaggatgaaaggctacacactgggtacagtgtacactgcttgggtgatgggtgcaccaaagtctcagaaatcaccactaaagaacttattcatgcaaccaaataccacccgttccccaaaatcctattgaaataaaaaattaatttttaaaaaattaattttaaaaatatatatatatatgtgggtcccatcactctcctgcttagaagtcccaaaaggcttccaggaaaaaaggatataatccaagaccttgccatggcctcgaatcctgacatcacactcttctctccacatgcatctcaggccagcctgggcagccccaggcctgcacatggttcctgaagccaagcccagctgaggcttccttggtccggccatgccagggtctgtctgtctgtctgtctgggacaatccacccctggtcttgctggttggtttcttctcatcagtcaggtcgtggcctaaacatggcgtgggtagagaagtctacggtaaccatgccccatgcctctgctggtatggcccacgcagagcactccctgtcaccctatttctgcacagtacttacccccgtgtgaaaccatcttgttgagctagttgtttatttgcgaggatgctaaaatataagattcgtgctgtcttctttttcatagaatcctggtgcccagcacagggccagacacacagttatcactccccagactttgcccgaagaataaaagaagaagggagggtgaggtgggggcggatcagcttgagtcaccacgcgtgtagctgacagtggaggaccccaggccacccccgcccgtggaaatccatgagaccgttcatcgtttcaagaaggacattgcaatgtttaccctattaacttggagataggcatttattgggctaaatcctcacgtagaatgagctttcccaacacaggagctgcgtcctatgcatactcagtcccatgtgcctggcgcagtgtgtggcctgagactgacaccagcatgtgttcacagccgtttcctcaagctgactgaattctcgccttcgctttctttggaaatggttttatagggtttgctccatctgttctacataagacagaagtgagacaccgggttcagggaccaggggcactcatgcctggctccgctgtgcccacggggcctccaccagagaagtgtgagactccgggttcaggaacgaggggcactcacgcatggctctgctatgcccacggggcctccgccagggacgtggagcggaggcgtttccttcttggtggccactcaacgtgcatttggcaagtgggatgtttgggttctacatcctggaaaaatatgtcttcatgattccctggagaattttatgactcacataaattgcaaagtctgtctccacacccagctctcagctgcatgtacattacaagggtacaaggattttttttccccattttattacttcaaaatacctgaaggataacaaactatacaattttctaactgacaccttgcatcttacccaaacacacacagcattatctatgggagaaaatccactcaattaaaaaaaaaacctatatatgtatataaatcttaccaaaattatttaaattgtccatctaggattaataaaatataaggagcttttgtaattcttgtaaatcaataatacatcccacctatgacaagatagcagtgaatagggaggtataatttttaaaagcagctccatctaaaagcccccggatttttgtgcactcataaagaaataatgcttgtctttctccagtgtgaagagaggagagagattttggaaagagaggagaaagggtctcagtgtggcaacgcaggtcccgtgagttccacgcagcctcggccagagtcacagatctgagcccctgcgtcctcctcaggaaagctctgctcgggatggcggctcagcgggaagccaggctgcttctgaggtctcacgggggatgaacctatgggaggtgggctcccccacatgtgggtgaggagggagatgacagggacatggagggacagacaacgtggccagcaccctctgtgtgaccagagatgcctgtagcaccgagataaggcctgaacagaaggaagggactgagccaccaggtttgacccatgacctgactgcattagccaaaaataaaaaatctgcccccattgttgagtacactgtgggaaatcaagggttctaggaggagaaaataagtctgtagaaaaagcctttgtttgaaattccctcactcattagttctctgctatacttagcaaattacatcacctttggtgcctcgatttcaccacctgaaaaatgggggaaaactaacagacctcctgcccacttcccagggctgagggagggtgcaaggcgtggaaaacaggcgcacatcaagagttgggttgttatttcacagccagtcctctgcaggcaggaggagagccacgccaccagtcctcaggggctcagacctgggaggccttacagacacccaaactggatctcatcgccttctccaacctgctgctccgcacactagacacagagaaaacggagctttctttgggtcttttgcttcatgatttagcaacgacctcaacgcagaaggtgattcttggctgtgatcggatgagcacaatttttttctggagaaccggcgttttctttatgagacacccccataaaatcaccaggcagcagagatagttactgctctgccccagaggctacaaggaagcccccacaggccatttgctggtgcacactccctggagccatgcgtgaggagccagcggtgagtgctccgctccaggctcccgatttggtgctctcagaccacgggacacagtctccagccggtgcccacgattttagagactgttcccattcgcactgagtaatcctctgtttctcggaaagaaagcactctgggaaatgtgcaaaggctgactttgttacagaagcagaaaaatgaggatcccagaaactgaaaagagctatacactgtcttcatctgcccaggaatgacaaatgacaaacactcagtgagaaaggaataaccagaaggagggatgtctgcagatgacaagagccagacttcttgtcttttgtggattcttgcaaataattaccacttacacatcaaatgatatgctgtcccaatcttctttacaaaatcatacgtttttcttcttttctgcctcaataaatgctaatgttccatgaagccaatgttattctcacccgctccacagtgcgtctaaacacagatgggcctgcagtggcttagccgcatcacccgctttccaggaggcatgatgcttaccctacccttttctagcatttctgcaaggactaaagtgattcttgtctgctggacagagaaacagtaagaaatacaaatgcaaatagactgccatcatggtgacttatgtaacaccagctttcagagacgccacagagacagattcacaggaggtaataagcagggcctggaagattgttttatcaatcttctttcaaatctactagtgatttcttgtaaacagtaattgcattgctcttaattgcttcattagtgcctgggcttcattattcaccttgtctcacttctattcagaccagtttagattgtttttctttctgtttttttatgaggaacaatggaattctgtctggattgcagagacatgagaggcaacgtggccgcacaggcggtttagcctgtcccgggccatatcctgctggagctttggcccagagctcctgaacacacccggcctggctctctctttcaccctttctgcctgttgccacgagtctcttcctgacccttttcctcaccaggggactcgtcgaggggtccaagcagcaacggctcggcaactccgggagctgggcattggaggaggccacgctgacacgctcaggagctcatccctgagcgcccacaggcccctggatgtccctgtaaggaggcttcctgcccaggcctgagggtccctctgtgacctctcagctggtgctgtgtcttcagcaccctccttggctcaaagagactgtcatctggcagccgaaaccctgtgatccccgtgtggctgtgtcctgccaactgatggtgacagcaggaaatgcacctgccctgccccctcgcccggatactttctattctgctatgaaaaacagagtaaaatttgagaggaaagggaaagtacccccgtagccacaaggaaatgaagtggaatcacgctgacattttcaataacacctggatctggttttataaagttgacctaacaagaaaatggtcctattgttatcaataaacataaccctgaaatctaagcgctttaaaaatccatgcaacagggcaggtgtggtggcttatgcctgtagtcacagcactttgggaggccaaggcgagaggatcgtttgagttcaggggctcgagaccagcctaggcaatatagtgagaccctgtgtctacaaaacaaaaactaattaaattcatgcaacaaattctaatatttttcaaaggctgttctgtgaaataaaaactcacctaaaaatcatctatgtatctaagaacatgtagggaacaaagacgataaaacagcacagagacccgggagcctggggctgcctggccctgcacagacttcgcctctgtgccgtggaagtggacaggtggggcctctcctggcccaaagccattgaagctggctctcctcctccatcaggacagcctcagccctcccaaccgcccagcacagcagctcagaggaggctggccgagcgcagccgccgccacgtcctatcccaccaaagatccatgctcagcatcgtggccacctaagtctcacgagtgtggctgtgaggttcgtttgagtacacttggcccaacatccagatcaggttcccaggcaacaagacagcaggttgcctctagaccctcaacaagtccgcccagttaggcctgcagggcagtccccaggggagccacgagcttgtttcctgcacggagctgtcgcctcatggaggcgctctcagccccggtgctcctttgcctcagtacacatggcctgcaggagagaggcaggatggggagaggccagagcctcagggagccagggcctcgcctgctcacaggagtcattttgcttctagatttttcttccacgactgtgatgtcgctatactgagccccttcaagtaatctcttaaagacgtattgcctgacagaatctgctgggttttgtggttgttgttcagaatatgaaggatgcctgcctctgatgcgtcagatgaaattagaccaagaatccacccatcccgtgaatttatgacacaaactcccccacatcactactgccttcttgagggaggaggccgttccctcagcaatggtgaataaaggtgtattgcagtaacacccaagctcaagaacagacatcttgtcttacacccaagcttcacacgggaccttcaccagaactcaccttcttggaagctgcacagaaccgtaacgtgaggaatcacatgcctagatatcctatgtgagctatcccaaatgccttctacacttcaaaaactatgtgagaagtctactccacgaaactcatatcagtgaaagtactcacaagttggagtgatcacagcacctcctgcgctcctccagggcaagcctcgctcacctttttattcttttccatgaaccataatgcctggcctacagattatcaataaatattcttggctgaataaatgaatgggaaaactgctgctgacttgaatgatttttttcctaaataagatgactttttatcatatatgttcagactggcaagaggcatgaaacgtttatcagtttagttgccacaaaatttctttctttttcaaaataacaacagatgttggcaaggatgcagagaaagggaacgcttatacactgttggtgggaatgtaaatcagcacaacctctacaaaagacatatgaaaacttttcagaaaactaaaaacagaactaccatttgatccataatcccactactaggtatctaccctaagaaaaagaaattattatataaaaaagacaccttcacttatctgtttatcacagtacaattcacaatagcatagccatggaatcaacataagtgtccaacatcgaagaattcaatcaagaaaatgtgatacagatacatcatggaatactattcagccataaaaaagaatgaaatcatgcctttagcagcaacgtggttggaaccggaggccattatcctaagtgaagtaactcagaaatgccgcatgttctcacttataagtgggactaaagaatgagcacacgtgaacatagagggggaagagtaaacactgggctacaaaaggtgggagcgtgggagtgggggcgaggatgaaaaatcacatgttgggttctgtggtcactgttctggtaatggctatgctagaagtccagaattcatgactacacaatatatccacataacgaaactgcatttatactccctaaatctattaaaagacgaagaagacgaagaagacaaagatgaagatgaagaagaaggaaaagaagaaaaaggagaaggaggaggaggaagaggaggaggaagaagaagaggaagaagaggaagaagaagaggaagaagaagaggaagaggaagaggaagaagaagaagaggaagaagaagaggaagaagaagaagaataagaagggttttgtgattgtggttcagaatatggctcttttatttgagccataaatccctaacctagagaagaccttgcaaataacccctctggaggccaagaaggatgtcgaaagcctgtctctaacaaaagttacacaacatcatagagtattcaaatgacattcatctgcagctagactaaaaaactccatgttgggttttcagcatcatctatcagaaacatcaagtaaacaagtaattttctccagtattttctcattcttcccacaaatactgcaaatgtacctaaatatcaagattatagttctgcaaaatactcctaaaatctgtttggaactctattccttcatttattaagatgcaaagatatactggttttctattatccagatacagtaagcatcaggaaacagtaataatttcctccatctgatattccgttatcaaaaacaacttttaaagaggttggttactttcattacattctatgatagattcacatctagatttccaccaaaaatgtagagaacacgacaacttgagactaggagctcttaaaaaataaacactgttgatgaattaaaggattttctgttagttgtatacatgcactttggggcataacatgtgctatggtctaaatgtttgtatttctccaaaactcatatgttaaaatcctagcaataaaggtgatggtgttaggaggtgagaactgtgggaggtgattaggtcttgagggtggacttctcatgaatgggattagtgtccttatcaaacagaccccagagagctcccttgccccttccaccacgtgaggacaagggtaaagacggctggccatgaaccagaaagtgtgccttcaccagccatcaaacctgccatgccttaattgtggacttcccagcctccagaactgcgagcaatatctttctgttgtgtagaagcctcccagtgtggcattctgctatggcagcctgaatgcagcaggacatggtgttatggaatcttgttgcttcaactgaacctagcagaatgaagagtctgctccacccatcctggctcagggccttgtcgtcagcctcctgaagccaactactaagtcatcacataagtctgtctgcagtaaacacactgaaagttccctggaaatcacagttcctacaaaagcctaggcaagtattctgaaaaatgacagccagtcatttctctgagacctttggccttatgaatttgctgggaaggtacatcttcctttcctacccctaccactttgcaagtatcagattgagcatcatattttcaggagagtcactgcctcatgcctgcctaccttttgatcatcatggaactggcaaaagcagcgctatctacttttccaggggatgcaaaggtacaaggccaggccaagcatagtgttcaagaacgcagctggatcgctgcgcagctagaagagagctggactctagactcccagattagtgaaaatgcacagaaccgaaaggcagctggataaacgtaaggcagctgaatgccatttttctttatttaaccagtgggctatgtcatcggatcataagatccagcgacacttggcttaaatgttgcattggtgtgcataggtttagatggtagtgaaacgtagcgttcagcatctgagcagaccattttctaaaaccagtaatgttcatcgatccagcccttccagtctgcaatatctgccagctattttaaaagtcaacagagttgcaaattttctaactgttctggctccaggtggcatgtggctgagcgactcagtcttcttaatggccaagtcaatggcccacggctccggctgcctctgagagcgtttgctttaccagtggtggaagtgtggctgcgtaactacaatgccttgactacagcctcaactcagccttccaatttacctctttgctggccagtgtctccctgatggatacacttatcgttaccaaaatctcccctgagaacaccagtgttgccgagatactctcactttattaaagtctaagtctgttttctgctgcctggatcaggcccatgctcctgcacagcatgaaaatgaagaaatgcacagcctgcagcagcaagagctctttcttctcttccgtttgatgaccacctcgggctgataccctgtctctctttccttctttcccagtcaacccctacaggccctgggactcctctccgtccactggaaaggcaactccccacggatggaatccgctcttctccccagctctgctgagcacctcatcagacattttaagcagctgtgtcacatgacttccagtacagggagccccacaccaggcttccatgccagctggttactcccaggcctccttgactggtactaatgcaccatgaccctcacaagtgcccatgccaggagaccatgaactttacctcgatggacagccttccgtcctatgctccagctattctttttgagggagattaccgaatataataagcacatgatatgtacatatgcatatatacacgtttgtgcatgtgtatgtatagagacacatatgtcactaaaataactgctcacagatatttaatttcaaacttccatttcccccttcaccaccttctgggcccaatctccccaaacaaagcagagtgtaataaaacgtgtatagttacttcttctgcagtgtcttctgtggtgggctccacatccaggttgagatcctcctctgtggtctgataacaaagatagatgttaaagatggttagcattgccatgtgtttgtaggtggcctcatacaggttaccaatatgaaaaagtactaactaaatatcccgcatgatttctgtaggacatggaaaccatatcaccgtcccttcccacctgaatttatgtttaactgtgtgatgcttcatgtccgagatggatcctttatacaacaggtggtaagtaaggcaaggagtgttcacactaaaccctaactcaaacgactaaatcaatgaagcgagtgtgacttacggtacaatctaaaggacgacaaggtgattcttgccagtggagaaagcgtggattttcatgaagctaaaatacgaacggagctgatgtggaagcacagagcagcggtgaaggcatgtgtgaccactcccatgagaacggaaccaaatcacagtcccaagtgagtgctgggagaatggattctagcagagaaatgaggcccagcccataaaacgtaaagcaagtgtttctgtggttggcacaaggtttaagtggaaccatctgggtctgagtctttggtttctacttaacaacttggagccacctgcttaacctgggcctcggagacatggcagtgcttctgcctagagatgtggggagagctccacggaagaacaccagccagccatcagcaccggctgccatgcagcagacacgggagagctccacggaagaacaccagccagccatcagcaccggctgccatgcagcagacacgggagagctccacggaagaacaccagccagccatcagcaccagctgccatgcagcagacacgcaaagtgaactgctgtcattattactatttctagtttcatcttctcacctagtagccaggagataatcatctctatccaagcttgactatgaatcttcagggaatcatgtttgatctgcattgtttaaaaacggagctttctctttctctatctaatgtattatgacatcccagagagaaaaatcatgcttattcctccaagagaacacaaataaaatgggtcagccagaccttgtgggctggcttatggacttgccttactcatcatttctcccattttcttatcttgcccccaaagcacgcccttggctgctgtaaccccgctgaaagcaatgattgaaaagtcctgtgtttgagatgtgccttcaacttgccagaacataattcatgaaatactacatgtttctttttcatgctagattctgccggggttttctggaggttctggctcttaatgagcacgttgccttgtcaacacacccatttatgggttaattatatatctgaaatatctcagaacaacacagagaaccacaaagactttccctggacagtcagatgaatctcccctggtctacaatttttataaactgtatttagtgttctctagtacaatggacctcagacccagttcagttcggttctctcagactacagatgagaaaacaggccagaaaggatagcagcttgaaaaggtggttagagcaaaacatgaatccaggaatgctgattctagtccctggaaatccaatcatcagtcctgtcacatttgcataacagcaaggaactaaagcaataaaatctaaactaaatcactaaaaaataagcactaaaatctcttagcagattttccgatgagaaaagcatgcaggctcctcctgcaagggttttagggcatttaacttggagttcagaggccagatatgctccatatagctctgccacatttcttgatatgtgagttattttaataccatgcaacataaaacatggacaaaactagagaggaaattcagactgtgaattccaaaacacagaggattttgtggatttggaaatttcctcagaaacttgaagtacctcatggttaatatttaagctttcatttttctatagaaagaactctggttttctgggttccaagtaaataggaatttaacactgtccatactccaccagctgtgctctcctgaaaaaattcagctaagaagcctgaaaaaaatttattttgcttcaagagctatttaatgtatccaattttcctcaaaacctttaccatctgccctctcctggggctggcaaggcagggcagaccatcagtcaactcggctccaaattcttgccacttgcaagtgctttctaggctcatggcatggttttcaaatcatgggaatctattcattgctgatccatttatgagcgatttgagaaatatgtgaaacacaagctgctcctcatggctttggtcactggaaataatgtaaagaccagggtcccacctggaattgtaaagcccctggccccctctctcccatcctttctgagcccagggcggaatcctccctctggacaagcccttcattcgtgagggctgagcaccttacagcttcagcacaagccaatgtgctgacgatgaccagctgggctataggaagcactagtaaatgagaaaagaacttctagctgatcacttgctcgttcactaattcaatatttagaaaaattgaatctctctctctctcaaaaaaagtagacttgaaatggcaaccgcagtaagggaatggatctttccaaggcaccatcctcaacaccaagaacaaccccatgtacaaacagaagaatcagtaacagtagggagccctggtgtcatccttctcccaccccaggtactttccatgagcagcagtatctgggctgttccatctaaaacaaatggacttcaatgtccgtgctatgcccaacagtctctgctaaacatcaatacatatgtcgagcattatttagcttggctttccaagaaaactattcaatatgaagcattcagtaaattctcttctaaaacagaatctctcattcagttcaaaggtatgttatgtgactatctcaagacgtacatataagaataaataaaatttaaaatagcattgaatttataagtacagtgctgggagtaggagataggcaaaaattaaattggactttgaggaggtttggtgagtgattacaaatgagccatgtttaaatgccatttgagttgctataaacacagaacaggtatatctaataatttagtagacgttaataaatttggggaactttctcttctaggaaaatgtatgttgaccatctccaattcaaatggagcaaatcagattccgtggagcagaggtttgcgtgtccccagggaagcatggagtgaaaaactctcagcagtgattcctgcacacccaccagccctgggacgggcaaggaacactttgatttcattatcttttctgtttatctttaatcacacctctttatctgaccattcatccttttaaggttgcattatcttttttcgtttaagatcacattatctttatgctctctgttccttgattcatcattgatttttgccttctggtttcatctttcactgtagcaaatggaaggcttctaatttaaagccacttgttgaaggaaaatcaaactgatgcagattagtttggaaacgggaatactttaagacttacatagactttaagaagcatcctgaagtttccttaagggcaacaatttgtttcttgtactcattatcatttatgtatttacaccacacacaatgccgtgcgtgtatacacacgcaatgtttatccatgtgcatacacaacgcaacatatacatccacacacactggatagccaactctctgacccatcatagtcacctaatggacatgaactgattatagtaaatgagcaatgcattggctgcagagttcggattcttgaggatgctgtgaaaagtgcgttctctcctgcactcacctctatttccataggctccacctcgatctttttccatagttccagcaactgtgcgattggcatttttaaactttccttttctgctggtcgagtattgatagtaggaaaggaaataaacagaggctcggaccggcacagggggacggccagacgggatgtcggaagccaagggacgcagaggccggcgggtggcggcgatggagaggacagatccggctcccagaggaggtcgtgagcgcggggcctgcgccggccggaggagggacccggggggctgcaatatggctgctcgggcgccgtcccctccctgccaagccagggctctggggagctgctgccgcttcccgctcgggctggggcgaggaaaggaggggacggcgctgcggcttcggaatctgtactgcgactttggcagagtaaacgctgcacttgcagcttcgaattgaatttcctgcctctcccccctcccttccctggccacgctcttccctcctcccctcactattttaccttaattggctctaaacgagggtgaaagttgagtctgaggatgccgctgccatagaaactgcatagcaaccaagggctggggaggcggggggggggggcggcaggtctttcccccccacccccagcacgcgcacacccttccccacctccccagcccgccgcgcctccccggagacccacaccgccacctcccgccgcagaacgggagggacaggaacacggacggagggaccgggacgaggggagggctccacgcagcacagctgctttcctgcggagcgttcaggagactcgggcacctctggaagcgctgcggactgagctgcccgcggctgcccccgccccgagggccgggacagcacctcaggagaagagggacgaagagggacgacagacaaatagctggggagaggcgggggggggcggcccgtggggtccgctgggccctacccagccctgcccggagctgcccgaaacagcactcaggcctctgcgggccaggatgaaaggcacgtgggccgctggggctcccagtggcagggcccgagggacagaaacattaattcaaacaacgtgtatcctgcccctcagctccttcaggtctccaccccgtcctatttcacaggtgacaaagtcctgaggctcagagaaggaacccccgaagacacagccaggcgcctgcgggagagcaaggcctcctgggccaccgctccttggaaaggaaccaggggaaaattcccctccctgtttcccttttttgggttgtggagtggggggatctctcttgcctccctccttactcccttctgtcctggataatgaaaggtgcgtgcgggtgaaagacatattcatttctccaatcgtccaagtgctaatcctgaagcattatggttccctcttttaggaaagggtgttaaagttaacacaatttaatgctgctttgggagtaagtgtattcatttctatagcaaattcctttatctttgagagaaatatctttttaaaaatagcttaatgttctccaaaattatcaatccctttttctttttcgactttatgcaatcactaagaaattcaattcactggaaaaaaagaaaaacccaaatcccagatactttgtatctcatagcaaagtagagtccaaagttaacagaggggttctgtac

SEQ ID NO: 523 - DNA, 424548 bp, Homo sapiens
  source 1..424548: mol_type = genomic DNA
tggatggccacatgtgtctaagccccggaaaaccatcctgagagatcaagaccatcttggccaggatggtcttgaactcctgacctcatgatccacccacctcagcctcccaaagtgctgggattacaggcgtgcaccaccacgcctggcctcgttttattcttatttatttatttatttatttatttatttttgagatggaatctcactctgtcacccaggctggaatgcagtggtgtaatctcggctcactgcaacctctgcctcccaggttccagctcttctcctgcctcagcctcccgagcagctgagactacagacgcacgccaccacgcccagctaatttttgtatttttattagagacggcgtttcaccatgttggccaggctggtctcgaactcctgaactcgtgatccaccctcctcggcttcccaaagggctaggattataggcgtgagccacggtgccctgcctacatttggttttatagtccaccttacacagttctctatacattgtaaatgagccaaatttcctgaattgaaaaagagagtcacacaagaggcttgcctccacgcacagacatgtagttttagatgtctgcacgtgaagctatatcaaaataagaataaactactgctaccaagaagtgggaaaaaaatttaaaaaggataaactgctcagaaaacgaaacagattaaacaaaaaattgtattagatgaaattttttttcatcgaatcttgctccagactcttcttctgttgcttcagacccttcttcatctgaagagtcttgctctgtctcccaggctggagtgcagtggcacgatcttggcccactgcaacctccgcctcccgggttcaagcaattctcctgcctcagcctcctgagtagctgggattacaggcgcgcaccaccacgcccagctaatttgtgtatttttagtagggacggggtttcaccatgttggccaggctggtctcgatctcttgacctcgtgatctgcccgcttcggcctcccaaagtgctgggattacaggcgtgagccacggcgcccggcctttcacttggttctctatgaaaaaattaaagagaaaatctgattgacactgtggaggacactacactccaaaaaaaaaagtactatattttctaatattatcagtgctttttaatattttctaatattatcagtgaagcttttgccgctttttcaaaatctggaagaaacaaggcggttgattcctttaatttcaggagcatgtaacttcatttataatgacaatgtttttgaaaaaataaattaaaccgacagtttcatttgtaggattgactttaataacacgcctctactgaacaaatggcgattaactggggaaaacggaattatggtaaccgaggtaacggggtcggggactctttctccttcgctgcatgctgggtggcggggagagaccgctctgaggaggtttggtctgtcggccacgccgtaggccgcggtgcattctgggtcctggcaatatggcgtcctccttgatgggctgatgagatgagtttcactgtagctccaaaccagagggcaaagctcccatgacccaataagcccacattgtccctttcctccgtggttccgtgtcgcccgtttctcaggactcgttctcaggcaggagagagcctcggggctgaaggccaggaccagccaggccgcgcggacctgaggttgaggaaccgggtgcaggcgagcacgatgggccggtcgtggctctggttgcagcagctcagacgagtgcgggacccgcagggctgagagtggctggaggagacccagggccctttgaacccgatcccttggccggagacctcagcccagtcggcccagtgggcgaaccggcaccaagagcggcctgcctgtcttcggaactgctgaggcggtggaggccgagagcagggtcatcgtgaggcctgaagtctcttacgcttttggcagctcccctcgcagcccctctggaaacgtacagcctcaggagcagccagtggcttgggacctggggtggtgtgtgtctgcggagcttcttgggctgccccatttcctagcggcccccacctccccacttcccgctcagagttagagataaggatctcagacttttgcctgagtaagggtctccgcactctttatccatttggttttcgatttcccgtttttgtttcttatttcaccaattctggtacacgctagtttttaaggctggaggttctcgagcgcttgctgccaaggactcccccaccccctcccccactgatggagtccgaaatgctgcaatcgcctcttctgggcctgggggaggaagatgaggctgatcttacagactggaacctacctttggcttttatgaaaaagaggcactgtgagaaaattgaaggctccaaatccttagctcagagctggaggatgaaggatcgggtaagtggattctgaaggcaccccttgaacttggtagtttccccaacaaagaaagtttacagcccgaaaagtgtccttgggaaagcgccgacatttccccctagccacacgttgtaagtcaactagaaagcaaaagccatttcagactgcagtttttggttgaaaatggaaaatgctgttttggttagtcattattcactgggtagtgttaattcaattccaactaagttctaattcagataataaaagttaagcaaatttgaaaatagagcattgcgagtatttacatgctctttggcatactacttagttctgtaaacacttagaggaaggacaacgtgcgatataatctttatacccacatgattagtctactttttaaaatatccaagctgggtgaagtgcagaagtctgatatactatgctaggaaatgagattactggaaaatgttcaactagtaacaaattagtgcaaagttattataaagttacactgaacttcattctagtcttctaaacaatttctcttgaagctagattttcctccttttatgtagtgtcctgttgctgtaacttggaaacaggatttctttaatcgtgagttagggtatgaggcgtcgagacttgggtgcaggttttagggtgtccgcatggtgtttggagtgtggagagtgactcacaagcagctggtaggaaagaaaacagccgaattttgttggatttgtccttcataaaacacccatctatttcctggcctcaaaagcaaaagggtagtactgcttctcctctatgcacacttataatttgtctttttgtaagttattttctccctccaggctgcttttatttgcacatttcagtggtataaaagaggaagttggtgttacaatgtttgattttctctaggcttatgtatatgtttatggaatattattgttttttagtatatgatgttgaacatatataagattacacttctgggctgggcgcggtggctcacgcctgtaatctcagcactttgggaggccaaggcaggcctcccaaaggcaggcggatcacctgaggtcaggagtttgagaccagcccggccaacatggtgaaaccctgtctgtactaaaaatacaaaaattagctgggcttggtggcaggtgcccgtaatcccagctactcgagaagctgaggctggagaatcgcttgaacctgggaggcagaggttgcagtgagccgaaatcgcaccattgcactccagcctaggggacagagtgagactgtgtctcaaaaataaataaataaataaaacttctggtaactctagtcagtcagtcagtagtaaccagttagctactgacttggcttacttctaaaaggttaggaaaatttgtttcatccaaaagcattttaaggagttaaataagttagtcattgggggaggttgtataaattctatcttatggacatctttagtagtaactatatagttaaaagcttttgtggttgctatacatatatgaaaagactttttaaaaaattctttgtggagggcagtttttttgttgttgttattttgaaatgtggttctctctgctgtcctaaacctatgttccaacagtttgaaactgattaatgggtatacgtttgaccttttaattaaaacattaatttgtgaatgatcaacattccctaataagcttttcacaggttgttaagagaaacaaaagttctgtgactcttagtgactactgagattgctgcttagaaaggagctggggagaaagtttgctgtatctgtttttcggtggagaaaatcagcagctaacatcttcagttgagtgtgtgggagtttggaatcttgtcatctcttccctcttccaaaggtcaggtcctttggaatcttgtcatctcttccctcaaggaccgtatcacacatgctataggacagaagttgcaaactcaaatgatattgagtggggatggtagcataagagaatgaaacaggccacatttaagaagaataatggcataggttcaaagataaagacaaatggcagctgacatttggcacagtgtgtgtgacagtttctggagggtgggaacaggggctccctgatgccataactgaaggggcaactgggctatggccaggcctctctctttgtctttgagaagtcagcaaactttttttttcttttattgtaaatattcatactaattcagatttattaccaaacacactgtagtccaacactgcaggctgaacaaccccatttgtggagtgtttttctgtttctttttttttttttttttttttgagacagggtcttgctctgtcatccaggctggagtacagtggtgagatcacacggctcactgcagcctcgacctcctgggcctgagtgatcctctcacctcagcctccccagtagctgagactataagtgtgcgccagtgtgtctggggttggggagtctcactgtgttgcccaggctggtcttgaactcctgggatcaagcaatcctcctgccttgtcctccaaaaatgctaggattacaggcatcagccaacacgctcagcctggggtggtttttttttttttttttttttttttttgagatggagtttcattcttgttgcccaggctggagtgcagtggtgtggtcttgactcactgcaacctccgcctcccaggatcaagctattctcctgcctcagcctcccaagtagctgggattacaggcgcctggctagttttttttgtatttttagtggagatggggtttcaccatgttggccaggctggtcctgaactcctgacctcgggtcgttcacctgcctcagcctcccaaagtgctgggattacaggtgtgagccacagcacctggccctggggtgttttttgaccagtgggttacctacgtaagaatctctgttacccaggcctccaggccacacagtcccactgtgctggacgtagcctccagtctggtggagcagcatgtttgtaaagtgaaatgtgtgggcgtggttgttctgtgctaggagctacatcaactacttcctggtggccactgactgtcctaaatgcaagctgagattttgcttcttcttgtggttaatgtgcaattccatacgcttttattttgtacatatattcattagttcttactggctcctatttagtagccttgctacagattcctcaaattgacatctttaccaaagttgactgactgatgactcccaagaagttttttttgccacccaacacttggcatccttccagagctacagcccttgcccgctctcagttgggattcctgccatctttgttttgaatcagtcttggttttcaaatgccacttttaccacattttaatttctaagttactgttactttaaaattattatcaagttagtttgttgtttggttaattctactatgtatagtgaatgaggcatatatgtatccatagtgtttttagcttgcaattttcaaataactagacatatatgaattgtagttcaaaatgaatcattcacagacctttggctaaaacagatacgtatatatctcccctatttgtgtttttggctcactgcaacctccgcctcttgggttcaagcgattctcctgccgcagcctcccgagtagctgggattacaggtgcccaccaccatgcctggccaatttttttcatatttttattagagacggggtttcactatgttggccaggctggtctcaaactcctgacctcaggtgatccacctgcctcggcctcccaaagtgctgggattacaggtgtgagccaccgtgcctggtctaactgtgatactttatagttatcacagagttcattttcctactggaaagtggacagtggggataactggtctcagatgactcttttgcctggaatatgtgggatggaatgacgggtgcttgagagctattgctctgaaagtgttgacagacatgctatgtctacacacatgtagactgacagacactctgtctacatgcatgtagcacccctggcagacacattctgtgtacacatgtgtggtgtcattgtcagacactatttccatgcatgtgtaggaccactgacaggcatcctatgtctacatgtgtaggggatgaaacggttagatgaagaaggctattttgtaaaccattctctagactcagttgcattgctctgtagccatactttgcccaggtcatggaggaagcagagtagatctgttcaactaatacatggactgccaaaggtttatgcggtcttttcagcaagggtaatagcaatccttcataatctacactaccccctctgctttcctcaccttgcgtcctctccacattccaactgtgccctgttccactcccctgagactggtctccatatggccccagtttgttgctaaatctaaagttctcttctctgtccttctctgttcttatttcacctctcagcagcattccacaatgtggaccatggcctcttcataaagctctttcctcacttgcttctgtgtctccacgaaactcggattttcctcttaggtcactagttgttccttctcagactcctttgctacctgacacctaaatgcaggggcaccccaggaattgatcttggaccccattctctgttctgggtgtgcccctccctagcagatctcatcggggcccatgattttaaatagtgtctacatgccagtgatgcttaaacccccaatctttagttctgatctggcctgaaatttctgtctcagatgcctactgcctgctttttcttagttttctccatcaccgcttgccacaaccaccatccactcagttgttcaagctgtaagtttagagtttatccttaattctttcctctccctctctttatcgccccatccaattcattagaacccatcagcgttacttccaaagcatgtcttacattggcctgcttcattttgtctccactgatgcagccccagtccaggcagccaccgtctcttgtctggacactgcatttgtgtcctgactggtctccctatgtccattcttgccctacaaccagtttttcacatagcagtcagagggatcttttatttattttgaaatggagtctctccttgtttctcaggctggagtgcaatggcgtgatctcggctcactgcaacctccacctcccgagttcaagagattctcgtgcctcagtctcccgagtagctgggactaccagtgcatgacaccatgcccggctgattttttgtatttttagtagagatgcggtttcaccatgttggccaggctggtcttgaactcctgagctcaagtgatcctcccacctcagcctcccagagtgctggattacaggcgtgagccatcacacctggccagagggattttttgaaagtgtgaaggggtgggttgcccctccacacctgtgggtgtttcttgttaggtgggacgagagacttggaaaagaaaaagaaacagagacaaagtatagagagagaaataaggggacccagggaaccagcgttcagcatatggaggatcccgccagcctcagagttcccttagtatttattgatcattcgtgggtgtttctccgagagggggatgtgtcagggtcacaagacaatagtggggagagggtcagcagacaaacacgtgaacaagggtctttgcatcatagacaaggtaaaggattaagtgctgtgcttttagatatgcatacacataaatatctcaatgctttacaaagcagtattgctgcccgcatgtcccacctccagccctaaggcagtttttccctatctcagtagatggaacgtacaatcgggttttataccgagacattccattgcccagggacgggcaggagacagatgccttcctcttgtctcaactgcaagaggcatgccttcctcttctactaatcctcctcagcacagaccctttacgggtgtcgggctgggggacggtcaggtctttcccttcccacgaggccatatttcagactatcacatggggagaaaccttggacaatacctggctttcctaggcagaggtccctgtggccttccgcagtgtttgtgtccctgggtacttgagattagggagtgatgatgactcttaaggagcatgctgccttcaagcatctgtttaacaaagcacatcttgcaccgcccttaatccatttaaccctgagtttgacacagcacatgtttcagagagcacggggttgggggtaaggtcatagattaacagaatctcaaggcagaagaatttgtcttagtacagaataaaatggagtctcctatgtctacttctttctatacagacacagtaacaatctgatctctcttgcttttccccacaaaagtgtgaatcagattctgttacttccttactggtggtctccattggcttcctctgtgcttaaagtagaactcagactcctcttgctggttcacaaagccttcatgatttggcctctgcctgccttttctgcttcttggatagaaactcctggaatgcttttctctctgatctttgcacacctggccccttctcgtcgttcatacttagcatctaggtcccttcctcagagaggcccaccatcaccccatctgaagcagccaccctgtcactcataaaccctcctgatggctatttatttctctgatatttttctccctacttcctcctggagatgtgagcttttcatcataaagcaaggacctagtctagtctatgctagtccatagggcagtgcttggcacatagtagggattcaacaaaactatactgatacaaaatggatagtttacaaaaggcttccacatacattatctttaaggctcaacagcaccataaattacctagggatcattctctccgtgttactgatgaggtaactgacgttttagttgaatggcttacctaaagttacataagtaacatggctagcagtgagaggaagtggaacctgtgcagagggagaaacaaagtttagttcaaaacaaaacaaaacaaaactgtatcataatgtctccactgaaacatttatgttaagaggtcagggggttgaaaatagcagaccagcagaccaacattcagcagacagagaaggatgctcagtctgctcacagcatgtgccctgtgcactggggcttctcctagacccttgcagggatccacaaggtcaaaactgttttcataataatggaacaccattggccttttccactctgttgatacctgcactgacagtgcaaaagtgatgaatcaagacagcggtgccaagctgtactactagttcctgatttctttgccatgcacatggagagaatgtccttgctaataaagcagtgaaaatgatgacttttactaaatcttgactgttaagcacacatctttttcagactgtgtgtgctgctccttctcctgcaggcaaagcccagtggctgcctggaggaggagcatctgctgccttcatggacgcagcacgtcccaaaggaatcaccgacaggccgcctctggatgttgaggcctgtgtccacggcagacgtgtttttgaaaatgaacttagtgagctgtcacttcaaggaatacagctgacagtatttgctgccagtcatgaaatttgaaccttcaagtgaaaattggttttggaaaacttgtatctgccgctgtgagcctggcagcttcccaagacttaaagatgtttctggtgagatccatagtgatattaatgaatggaattaatgttgtagaatgaaatgtgcccacatttggaacagctgcataattcagtgaacaaatatttccagatgaccaatccatgatattataaaatcatccataggtaaaagatccgttcaatgttagaccagtggattttaatgtaatagggtacaaaaagttcaccagaggataggtgtttttttttctttttttttaagacggaatcttgctctgttgcccaggttggagtgcagtggcgcgatctcggctcactgcaacctccgcctcccaggttcaagcaattctcctgcctcagcctcctgagtagttgggattacatgtgcctgctaccacgcctggctaattttcatatttttagtagagatggggttttgccatattggccaggctggtctcgaactcctgacttcaggtgatccacctgccttggcctcctaaagtgctgggattacaggggtcagccaccacaccccgcttgatgttctgttgtgtgcgtgtgtgtatattttttgttgttatttgtttgtttcacagttcactgcatccttgacctgggctcaagtgatcctcctgcctcagcctcctgagtcgctgggactacaggtgtgagtcaccatgcctagattttttttttggattttttgtagggatggggtctcactatgttgcctatagtgagagtttaaatattttattcaaatagattgcaacagatctttaagaaactaccacttactcaattttgttgtaatatcaaataataatattctcaattatttggatattctgatactcctgccattatgtatctttgtgaggccagatttttctcacatacttcaaccaaaacagtgtatttcaacccattgaatgtggcaccaaaaatgagaatccaaggtggggtgcggtggctcacacctgtaatcccagcactttgggagactgaggcgggcagatcatgaggtcaggagatcaagaccatcctggctaacacgatgaaaccccatctctactaaaaaataccaaaaattagccgggcgaggtgacgggcgcctgtagtcccagctacttgggaggctgaggcaggagaatggcgtgaacccgggaggcagagcttgcagtgagctgagattgcgccactgcactccagcctgggtgacagagtgagactctgtctcaaaacaaaacaaaacaaaacaaaacaaacaacaacaacaacaaaaaaaatgagaatccagttgtcttctatgaagctggatattaaagagatttgcaaaaatctaaaaaaagccacctgagacaagtgacaagataactgacaatttttgaaaatatagttatttgtagaaatgttatttatttgaatatataataagtttgatttttaagtgaattcataaatatatcaattatgtttttctgttttaaccttcaatacggaaaatgttgataaatgaaactcataaaaaagctctttgagggtcttcaggaacctttaagaccgtaaaggggccctgctgccagatgtttgagagttattagtgtagttagaagaaagtgggcctcatccttaggaagaagggcttgaggatatcaggtggctggtcagaaatgtcaggcagggccttgaagtgacattagataagaaacataaaggccctaatctgttgccctctttccattcgctctgcctaaagaactgttgaggtctctggacttggagctgggaggatgtttgtgaagagcctgtgtgattgtgagggcagtggccttacatgtggccacctagccctccatcaggtccttctattgctccagatttctagtgtgtgtccggagggagatgcaccaccgcccacccagtagctcttgtgctgggagtggaggaacacccagtctgtctggaggaatgtccactctgtctggcaaggaggaggtggccagaggttcagccaaggtggacagctcacgggaagtgtcctgtctctccagggcgctgctgcctagacagactgacagacacggtagcaccaaattacaatacgcaagtataggtatcaatcatagtaattacaggtgagaatgacattattacggggagcatcttgatttaatattaaataagtaaatcatttgcattgaactgcatttatgaaagaaatcatccacattgaccagcattaaactcccagcagccagtgacttcatgtagttggtgatggggagctgtcccaggattccagctggggagttgttgtgcataaatttgtgttttgaaataccttattggctatggatggagtggggtgattggagaggggcgagactggaggtgggggcaccaagtggagaggagttgtgctaatccaggtgagaagccctgggggctgggcgtggtggctcacatttgtaattccagcacttcgggaggctgagctgggaggatctaaaaagttttttgttttttttttcttaaatctaggtagatactttgtggttcccgagactcacatgagacactcacatcagcgcttgtgtgattgtaagggcagtggccttacatgtggccacacagccaccgtcagggcctcctatttctccagaattctgtctcacctctccaatccctctactccatccacagacaataagatctttctaaacacaaatttatacacaacaattccctagctgggctcctgggcagctccccatcaccaactacatgctgagcccaggaatttgagaccaacctaagcaacaaagtgaggccctgtctctacaaaaagtaaaaaataagccggacatggtggtgcgcacctgtggtcccagcaaattaggaggctgaggtgggaggatagcttgagcctgggaggttgaggctgcagtagtaagctatgattgtgctggtgcactccagcctgagtaatagagtgacaccctgcttcaataaaaacagcaagaaaagaaaccttgggagccacaaaagaggcggctgcagtaggaatggacgatagagcatggatcctactgatttgaagaaggtagaaatagaatgtgaagtggatgggttccagtgggtggagtttgtgggtgtagtgtggactggctggctggtacagttccgctctttttatttgctcttgaaatggatatacttttcattagtgagtctcatgtgagtttcaggagtcacaaagagaccatctacccagattaaaaaaaaaaaaaaacttaaaacatgctggccaggcacggtggctcacgcctgtaatcccagcactttgggaggtcgaggcgggtgggtcacctgaggtcaggagttcgagaccagcctgcccaacatggcgaaaccccgtctctactaaaaataacgaaaaatgagccgggcatggtggcgggtgcctgtaatctcagctacttgggaggctgaggcaggagaatcgcttgaactcaggaggtggaggttgcagtgagccaagatcttgccactgcacttcagcctgggtgacagagtgaaactctgtctcattgttccattctgaagagctgtggaagactcttgagatggataagaacatgtcctcattatcaccctgtggagttctagagctagagttttaacaagatagcatgtggattacacataggaggtgtcctccagtttctgactctatcctcctcttattcaaatgactttaaaaaggaattttgaaggctaaggtgggaggatcacttgaggaaaggagttcaagaccagcctggtcaacatggtgaaacacccatctctaccaaaaatttaaaaattaggcgtggtcgtggatgcctgttatcccagctacttgggaggctgaggtatgagaatcgcttgaacccgggaggtggaggtttcagtgagccaagatcatgccactgcattccagcctgggtgacagaacgagactttgtctcaaaataaatcaataactcaataaatcaataaatacaaaaataaggaggtattttggtcatctacaatacttgtttcaggagagctgaagtttgatacctttttctaagtctaaatatatggaaaatggccaggcacagtggctcacgcctgtaatcctagcactttgggaggctaaggagggcagatcacttgaggtcaggagtttgagaccagcctggccaacatggtgaaaccctgttttctactaaaaatccaaaaatcagccgggcatggtggcagatgcctgtaatcccagctactcgggaggctgaggcaggagaatcacttgaacccaggaggcagaggttgcagtgagccgagatcgtgccactgcactccagcctgggcgacagagcgagactccgtctcaaaaaataataataaataaatacataaatatatggaaaatgccattccagtaaatatttggcattgcaaatcaatgctttaactgtgttctaggctgggcacagtggctgatgcctgtcatcccagcactttgggaggctgaggcaggtggatcatttgagctcaggagtttgagaccagactgggcaatgtggtgaaactctgtctctacaaaaaatacaaaaaattagccgggcatggtggcatgtgcctgtggtcccagctactcggatggctgagtcaaggggatggtttgagtcagggaggtcaaggctgcagtgagctatgatggtgtcactgccctccagactgggtgacagagctagaccctgtctcaaaaaaacccctgaaacccttaaacttgtcacatattggtgggtgtgactgcagagaattgtcatgccttcagaggccgaacaggaaacagctgaagaggagacagtcgccgagaacaagtttgaattttacccagctgtcggtatatttttcaggtgcgtttattgttcttgactagtactttttgtattttaaaatgttgatgtaatttcaaactgacggaaaacctgtaagaatagtatcatgagcttccctatagcctttgcccaggtttgcagattgtttacatctcgccttgtttactgtcaccctccatttacatattcagactgagctggagatgctgtcccccttctactcctaaacaccgtgtctgtctccttagaggaggccattttcttacgtaagcacagtgcagttgtgagagtcaggacctgtatcatggatatgtgctcccggccctctgtagttcagaaggtcaggtgttgctgcctgcccagcaatgccctcattatgccccgcccgtcacccaggatcacacgttgcatttggtggtcgtgtctgtgtagcctaccttaatctaaagaagtctctcagtctgttttagactttcttgaccttgatttttttaactgtgaatttaccatctcaaccatctttcagcacacagtttagtggcagcaagcacacccacatgcttgtgcagccaccaccagcatccaccaccagcagccatctccagcagctttccatcttcccagactgaaactgtctccattaaacaccaactccccattccccttccccagcccttggtaaccgctcttctgctttctgtctctgaatgttttggccttgcatgtagtagaatgtcctgaatttgagctgcctagtctttcctcatattcacactgagatggggcattttgggtaatgatgcacctttgtcagtgaatcccatcaggagcacacgacggtgctttgtcccagtactgtcatgctcatttgatccattaccttcaagccgtttcttgctgagtggtcgcctcctgactgatgctgcccttttgccatacctgtttgggagcacgtcctgactttccagcacaaccagagggcccaagctcactctgtgccctccctgccccagtcctggaattagccttttctccaaggagcctggttcctgttagtggcgaatggcattgagaagccacgaacgtgtgcatttagagctgggctgtgtgctttgcccttggtgtggcatgcgtctcccgttggttggccctctgagcaggagagagaggatggcgctctgtcttgtttacctctgtttctctgtgtatgctggaaccatggatgtgtagagagagctccagtccagctcctcaccatgatatgttcagcccttcccactttgcctgctaccactccctacccagccatgggaaaccagctccattgtcctcatttaatcatgggctcaaagctggaatgcacagaagggagcctcggaatggctaacgctggccacttgggaaagcaaatgctgcaagaggttgacttccttgttttctgaggtaaacgttacatatggtgaaatgcacagaccccagctatctgaacaattggctcatgctgtctagaaatgtcagcattagtcagtgttttgtgggaaatcactgttgttttacatagatggcactgcacgtagggtgcatggggtgaaggggacggaagacgtggtcatggccctgtaggaatttacatcttataagagaaaaacaacatccttacccacagctgagtgaaaagcacagtgcagtcatgatctgcccttgagtaacaaggtagcgatttcaggaattctgcagctggacattgagatggtgtctgttctgcaccagagacttggctgagctcctagctggatgggctgtggagtccatggtggctggacgaagatctgtgtgctcaggtggagtggttgcgggagcagggcggaggatggacaatgaattcacaagtgactgatgtatagaatttagtcattcagctactatcatcgagccccttctctgtgctgggcactgggctaagtgctgcggataccatggggagtaattcctgcgttgaaggtgttttccagtctatcagggcagatggatgacagtgcaggaggcagggtgtgaggtggtggtggctggatgggccggacggagaaaggccttctggaggtgggagctctaagccagtagctgaaacagaatggaagggagtggggtggaaggttcagctggaggaacggggacgtgcaggagctgagaggtgagtgagcagggtcttcagggaaacgccactgggggcctcctgcaaggggccttcccttgtgctgtgggagccgcctcatgcccacccggtgctctgtgcctgccattcccttcccacactgccactccccagcacttggctacgtgttcgttttgtctccccactaggatgttgtatagagaacagggactctgtgttcactgctgagcccgaggctgttcccggggtgactggcggtcaataggtgatcaataactgtttgttgagtcaaggaagggagcagagaccctgagaagagaagaactgagagatctgtgagccggggggctggacaggacagatcctgaccggcttataaggccacaggaatttggattttatcttaagcacaagtaagaaagcttttaaagcagggtggtgacatgttcagaatggcattttattttattttatttttgaaatggagtctcactctgtcacccaggctggagtgcagtggtgtgatctcggctcactgcaatctccgcctcccgggttcaagcaattctcctgcctcagcctcctgagtagctatgattacaggcacctgccaccacacccggctaatttatatatatatgtatatatatatgtatatatatatatatatatatatatttagtagagatggggtttcaccatattggccaggctggtctcaaactcctgacctcgtgatccgtcagcctcggcctcccaaagtgctgggattataggcatgagccacgcacccagccctagaatggcattttattttatttttatttttagtttttttgaggcagggtctcactgtgtcactgaggctggagtgcagtggcacaatcaccgcttactgtagcctcgacctccctggtctcaggtgattctcctgcctcagccttctgagtagctgggactacaggcatgtgccaccatgcctggctgatttttgtatttttttgtagaaacagggttttaccatgttgcccaggctggtcttgaactcctgggctggagtgattcaccacctcagcctcccaaagtgctaggattacagacatgagccaccgcacccagcccaggatggcattttacaaagatccctgtggctgcagactggggtgtgtgagaatgtgtatatgtgtctgagtgtgtacgtgtgtttgtgtgtgactgtgtgaatatgtatgtgtgagagactgtatacatgtaagtatgtatgtgaatatgtgtgtgtgtgagtctgtgtgtatgtgtgattgtgtacatgtgcttatgtgtatgcatgtgtgtttatgtctgtatgtatgtgtgtacatgtttatacgtatgtatttatgtgtcagtgcatgtgtatttgtgagtatatgtgtgtgttagggaggagcatggtgtggggtggggagtctcttgagggtaggaggagatgagggtctggtggcggcttgggctggtagtgacaggcccggcagccccaagagcccctggaagcagaattgcgacccttggtgactgcttgggtgcaggaggatgcagggtgacacgcagcctcctaactggatgtaggagagaaaaacaagatacaccaggcatttggaaagccaaagaacacgtgtttgcttgtgaaaacttaaggaatgttttggtgggatatgttgaaattgttgcctaaaacgatcgctgatcttgtgcccctcagtgtgtggccttcgtttacccctgcttcccctcactcccctgcttgggggctgggtggtcatgacagcctccccagtacacagtgagcatcttttagtttgatgttttcttggagagctttttattttatccttaaaagtagatcagacaaggccgggagcagtggctcatgcgtgtaatcccagcactttgggaggctgaggcggacggatcacttgaagtcaggagttcgagaccagcctggccaacatggcgaaaccccgtctctactaaaaatacaggaattatctgggtgtggtgacgcacacctgtaatcccagctactaaggaggctgaggcaggagaatcgcttgaacctgggaggcagaggttgcagtgagctgagactgcgccactgcaccccatcctggcaacagagcaagactcttgtctcaaaacaaaaaacaaaaacaaagtagatcggacaagcagtttaaagatatatcaaaacaaaagtactgtgaaaaagttaaatcagatttttcctgcattttctgtaagtccttgctgaggtccagatttagttttcagctaggtgtgaccgtcgcctgccttgctgccgatgtcctgaagatgcttcatgttggcacatgtggcttcatcgggtgggctaccatcctgcatcaatagtgggccgtttccatggtttctggtctgttgctggtctggcttggcaggtggcagagcctgggtcagacccgcagtttggcctcagggctcaggctccagagaaccactgtgcagccttttacttcgtacacacagctcttttcaccaagatgtgtttttactgggtcagcaggcatgaatgttttccctgaagagtttttttttttaatttttatttttgagacagggccttgctctgcaacaggctggagtgcagaggtgtgatcatagctgaggaggctgaggcgggtggatcacgaggtcaggagttcgagaacagcctggccaacatagtgaaaccccgtctctactaaaaatacaaaaattagccaggtgtggtggcggccgcctgtagtcccagctacttgggaggctgaggctggagaatcacttgaacccgggaggcagaggttggagaattgcttgaatccaggaagcagaggttgtggtgagccgagactgcgccactgcatttcagcctggataacacagcgagactaagtctccaaaaaaaaaaaaaaaaagataataaataaaaaataagggagataaagttctgttttctttttttgttttgaaatcaagatatttgttttagtcaggttcttttggttgcaaagaagagtctcacttaaatgtccctaagcaactatgttgcctaaggatgcccagtgcatcttaattgctggatgagttgccacaaagtgaacactctcacaaccagatccagaaacagaacagccccgccttgaagatcctctgtgcccccagtcgtgcccacccctccccaggaagctgtgctcctgatgtccagggttgtgtgaccttacttttgcttttggtttctctcgctcagcattgtctgtgagattcatccatgctgctctagtagccatgctcattcacccccttggaccgcagttaactcacctgctgatggacatttgggtggtttccagcatttcggctactaaaattgtgctgcagggaacattcacatgtcttttctttttttttttttggagacggagtctcgctctgtcgcccaggctggagtgcagtggtgtgatctgggctcactacaagctctgcctcccgagttcacgtcattctcctgcctcagcctcccgagtagctggaactacaggcgcctgccaccacgcctggctaattttttgtatttttagtagagatggggttttaccgtgttagcaaggatggtctcaatctcctgaccttgtgatctgcccgcctcggcctcccaaagtgctgggaccacagctcgcatgtctttttgggaacatgtatctaatatgtctctggtgttgattcctaggggtggaattgctgggagatagagaatacaaatgttcagctctaggagataccgccacacccttcttattttattttattttttcatattaaaacaacatttattttaggtttagaggtacatgtgcaggtttgttatataggtgaactcacgtcacagtggtttgtgtacagattattttgtcagccaggtattaagcctagtacccaacagctttttttttttttccggatgtgcaggtttgttatataggtgaactcatgtcacagaggtttgtgtacagattgttttgtcagccaggtatcaagcctagtacccaatagctttttttttcagatcctctccctcctcccaccgtctaccctcaagtaggccccagtgtgtgttgttcccttctttgtgtttgcatgttctcttcatttagctcccacttataagtgagaacatgcggtgtttggttttctgttcccgtgttagtttgctaaggataatggcctccatgttcccacaaaggacatgatcttatttttttgtgtggctgcatagtattccatagcctatatgcaccaccttttcttttctatatgttgatctctggcatgtaccacattttcttatctgatctgtcattgatggacatttaggttgattccatgtctttgctattgtgagtagtgctgcagtgaacataagcatgcgtgtctttatggtagaaggatttctagctttgtgtgagagtcccagttcctccacatgcttgccaatacctggaacgcatgttatcttgaaagttttgtagaaaaacacctacagtccttacccttgagacttgtacagataatactaggaagtgtctcttacatgggagagtctttttgtaactgttggatgactgcgccaatgccatcaatgactttgtgaggtttggtggaataaggagcttggtagaagctggattgctgcggaataattgttaagaaggcaaagggaaggggaggtggtggtcacacaccatggggggtgtaggaggagcaaggtgggctggtgactgaaggaggccacagtaaaacaatgttttctttgagaaggagccagtgcaggggagagtcaaggcaggggagaatgtggtgaagcaagcggcactgctgaggaggggttagagccccagggctgggaggcggagggaggcgtgcactgctgtggaggggttagagccccagggctgggaggcggagggaggcgtgcactgctgtggaggggttagagccccagggctgggaggcggagggaggcatgggtgtgggagctgtctcgctctgtactttgtatctctttataatttgcaaacattttaaaaggtggattaatttccctaatcctgacaaaggccctagcaggcttattttgttacagttgagtaaactgaggctatttggagagcacagccaaccttaccaaattctttgggtgttaagcggcgagccaggagctgcatctagcgctgggacagctttggtgcccggtttctacactgctcttgcttagttttgagtgcagcctttctggcagtttctcattggtttaaagtccctccttatgtggagtcagacaactttgatggacttgaagaattgaagaggcaacatagtttttatctaagagaatgggatttggagtcccactgacctttctccaagctggttccacggctctctacctgtctgctcctggtctgagtctgagtgttttcatcaatcaagtgggtctaagactcctcctgcatagcgcagctgtagggattaagcaggataatattgagaaattccctgggactgcttgactgtagtttaagagcccaatgtttggtgcctgtctcatgccgtggtcagcttctgtgcagcaaatagagatagcgcggtaactctgtgtgtgctgttatggagaggtttcccagatgttactaagtaaaaacaatgcaaaacaaggcacagaacagattttatggtatgaacctatttgtgtttttaaaaaggtatatgtacacataaataaaataattatataaaaaatttatggaaggtatacacttatacacaggtatgggaggtaggggtaggtagaattataagaatgtatattttcctggctgggtgcggtggctcacgcctgtaatcccagctcttagggaggccgaggcaggcggatcatgaggtcaggagatcgagatcatcctggctaatacggtgaaacccctcctctactaaaaatacaaaaaaaaaattagcccagtgaggtggcaggcacctgtagtcccagctacttgggaggctgaggcaggagaatggcgtgaacccgggaggcggagcttgcagtgagccaagaccgcgccactgcactccagcgtgggcgacagagcgagactccgtctcaaaaaaaaaaaaaaaaaaaaaaaaaaaaagaatgtatattttcctgtacttaatttaaaaaacttctgcatgattattttagtgttagtttaaacagcaacaacaaaatattacccttatgatatgttctctattagcttattagctgtacctctttttttttttgagacagagtctcactccatcacccaggctggagtccaatggcatgatctcggctcactgcaacctctgtctcccaggctcaagcgattctcatgcctcagcctctcgagtagctgggattacagatgcatgccaccacatctggctaattttagtatttttagtacagacagggtttcatcacgttggccaggctggtcttgaactcctgacctcaagtgatccacctgcctcagcctctcaaagtactgggattacaggtgtgagccaccatgcccaacctatacctttttgttttattttatttttttttttggtggtggttctaagattttcaatattacatctttaagttatcacagtgtaccttcaaatgatattatgccacttcacatgtaatataagaaccttatagaagaagggtgtactgctctcccccgtccttttgctatcaatgtcatacattttatttccacacattttaaaccccacagtacattgttattacttaaaaaaggtctggccgggcgcggtggctcacgcctgtaatcccagcactttgggaggccgaggcaggcagatcacgaggtcaggagttcaagaccagcctggtcaacatggtgaaccctgtctctactaaaaatacaaaaaaaattagccgggcatggtggcgggcgcctataatcccagctacttggaaggccaaggcaggagaattgcttgaacccgggaggcggaggttgcagcgagccgagatcgcgccactgccctccagcctgggtgacagagtgagactctgtatcaaaaaataaataaaataaataaataaataaataaataaataaaagtccattatcttagaaataaattttaaaataagaatatctcttatattaacccacatatttctatttattttttctttttttttattctgagacagagtctcactctgttgcttcgtctggagtgcagtggtgtgatcttggctcactgcaacatctgcctcccgggttcaagcaattttcgtgcctcagcctcccaagaagatgggactacaggcatgcgctactatgcccagctaatttttttgtgtttttagtagagatgggatcttgccatgttgaccaggctggtctcgaactcctggcctcaagcagtctgcctgcctcagcctcccaaagtgttaggattacaggaatgagccactgcacccagcccacatatttctgtttctaggcttcattccttttatagctctgagcttgaatctggtatattttccttcagtctgaagaactttaactttgcttatagtactggtattttggtcacatgttttctcagcttttgtttgtctgaggttgtccttatttcacctttatgctcctagcactttaaggatgttctgttgtctcaggcttgtcttgttcctgaagtctgctgttggtcttacttttgttctctagtatgtaatattctttttctcctccagctactttaaagatgtttttgtcattggaatttagcagtttgattacaatgtaccttggtgtagttttctttgtgattagcctgcttatggtttgttgacattcttggatctgtaggattatacttttcaccaaaattttggaaaatgtactgccattatttttccagttttcctatctctccccttgttcctcctcaatcttccagagctctatttacatttattttagatgctagatattgtcccactgaggatccccattccctccatctttttttcctctgtgattcagttgaattgtttctgttgcaatgtcttcgcgttctctcatctattcttctatagtatctaacatgctctttattttattgttacagagacaggaggatctcactatgttgcccaggctggtcttgaactcctgggctgaagtgacctcccatggtgtcaggattacaggtgtgagctgcaatgcccagccctaccatgctcttaagccaactcatccgatgtatttcaaaatttcagatgctattttttttctttaaaagttccatttggatttctttcttcgtattcatgctctcttttaaatccttgaacaaatttgtaatattgttttaaaaatcttatctgttatttcctcgtcactctcatttttgggtctagatggactgactttcttgtggttgtggatcaggctttcctgctttttcttacctctagtaatttctgattggatgctggacatagggagtgttacgttgttgagcatctgcgttttgttttctgcatttaaacagtgttgagttttgttctggcaggaagttagtttacttgtagatcagctgccttcttatagggcttgtttgctgtcttttaaaaacaggtctaggccgggcgtggtggctcacgcttgtaatcccagcactttgggaggctgaggcaggagaatcgcttgaacccgggaggtggaggttgctgtgagccgaggttgtgccattgtactccagcctgggcaacagagcgagactctgtctcaaaaaaatgaatgaatgaatgaatgaataaataaataaaagcaggtctaggtcaggattggaaaactatggccccttgcttgtttttataaataaagtcttctggaacacagtcccattgtttgtggatggtctatgttgatttcatgtgacagtggtaaagttgagaagttgaggcaaaatctatatgtcccacaaagcctaaagtatttattatctgcccctttacagcaggaaatttggtgacccctagtctagagaagcctttacttttggtctagtttagccctgtgcctaacgttgtggcctttctgagtctccgtgagggtcgtgggtgcttcatgaggtcccttaattcttcctcgttggagcttgaatgtttctcaccctgctccgcttctcctgcccctgtggctgctctttgcctggcctcctggagtctcaccagcagcacgccctgccttgccttcaggcagggactcaaggagcccagctccgtttctgcctcctccgtgtggctgtctcctccttgttactctgccgctctcattctggctgctgtggccatcatgaactcagacctctctctcctcagctcagtgactgtcacggtctgcatgggcccctgtctccatgcagaaagctcctgtgtcacggggcacacctcatttgtcttcccgctcagggaccacgttcctgtatgactcgttgttcaatgcctgaagaagtgttttatgtattgtgttcagttttctagttgtgtatggtgggagggctaggctgttcctacttagtccatcttttcctggaagtggtagtccccccaagtatgatatagaaggggcaaatgaaagaaagtgccagatagatgaatgatgcgtgacgggatcaccttttattaagtaggttagagtagctgatggttgatttttttatttttattttttatctttttgagacagagtctcactctgtcacccaggctggagtgcaatggtgcagtctcggctcactgcaacctccgcctcctgggtttaagcgattctcctgcctcagcctccggaacatctgggactacgggtatccaccaccatgcctggctaatttttgtatttttagtagagatggggttttaccatgttggccaggctggtctcaaactcctgacctcaagtgatctgcctgcctcggcctcccaaagtgctgggattacaggcgtgagctaccatgctgggcctgatggttgattctttacagtgaataagttgttatgtattaatgagttgttctttcactgaacctaattatcccccccagtggagtttcactttccaacttacacacagcattaatatttaagattacattggtgtatcacattaatagtacagattaaagtttggaagagttcagctttcatgatccctagacaactaatttgcaaggctagatttagagtttctcctttctctgatagaaacatttgcatttcacttgggctttataacgccaggtaggtcagaggttgaaactgaaataattgttaaacacgtaagaggatttaaggataaaatcctcccctgttttggtgttacagatctaaattgggcactcagtcatgtagtgccagagtgcgggatttggctggctaccttaaaggtttagttaattatacagaaatcctctttcagtgttaatcattgttcatgtcctatagaaaatggtctaattgttcttttcatttagctattttgtttaagaaggtcctttctagtctgatttgatttctttcttttttgaaattaggaagtaaagaatacagaaaacatctatttacaattccatcagtatttataaaaacatctgtgtgcccccagcccagtcaagatatagaatatttcagtaccctaggacttctttatgtgttgcaccttgatcccagttactccttttcttaaagaggcaaatacttttcttccttttgttggcaataattatctcttcacttttcttttgagatcgggtctcattctgtctcccagactggagtgcggtggtgtgatcatagctcactgcagcctcgacctcctgggctcaattgatcctctcacctcagcttcccgggtaactgagactgcaggtgcacaccaccacaccaagctaatttttgcattttttgtagagacagggcttcaccgtgttgtccaggctcctctcaaactcctgagctcaagcaatctgcctgccttggcctcccaaagtgctgggattataggcatgagccactatgcccagcctcttcacttttcttaatggttttcctacctgtgcgtctctaaaagttgtacttgcgttttcgtgtgttgcttcttttctcagtatcgtattgataagaatcaggtggttgagaaaaacatttaggtatgctgtagggatagagtaactattttaaattcttttaaacaaaaaaatcaggtgcttgaatatatgttgtttacttctatgtaatatctcatttcatgtgtacatcacaatttacttatccattctactgctgaacaatgttgaaattagcattacatatttattttagagactgcgtctcactctgtcacccaggtgggagtgcagtggcaccatcacggctcactgcagccttgacctcccacggtcaggtgatcttcccacctcagcctcccaagtagccaggactacaggcaggtgccatcatgcctggctaatttttctttgtatttttttgtagagatggggttttgccatgtttcccaggctggtctcgaactcctgggacaaatgagcattcttatatattctggtacacctaagcaggcataggatataagataattatatattttcttcttttttttaaaaaaatgcctgttcaagtcttttgcccagttttctgttgagttgtgtttttcttactgattttaggagcttttatatattttgaatatgtattataaatacctcccagcctgggcaacatagtgaaaccccatctctcaaaaacaaacaaacaaaaaaagtagccgggcatggtggtgcacacctgcagtctcagctacttgggaggctgaggcaggaggatggcttgatcccagcagttccaggctgcagtgagtcgagatcgcaccagcacactccagcctgggtgacagagtgagaccctctctctaaaaaaccaaaaccaaaaacaaatctcaaaatctttccactcggaggcttgttttttcatgttccttatggggtcttttgacattctccattttaatatggtctgataatcagtctgttcctttaaaggttggtgctttttttgcatcttatttaggaactctctttctcccttgatggcatgaagttaatctgtattatctgttaaggctttatgctttttctttcctgtttaagttttgtataaactttgtgtatggtttaaggtggggatctagtttcccatgtggatatctagttgtcttagtagatttttgtgaaaagctcatccttcttcctcagttgcagtgctctgtcgtaggccaagtaggtctgtttgggacttgctgtttatcccattgatctgctggtgtcattggtcagccctagcaccactctgtctgctttaattactagggctttataaaaaatgtgtgaaggaagcacttgtttttcttgagaatgtcttggctattcttgttcttttgttcttcatataggtttaacaattagcttgacgagttcaaagaaagaaaatttggggggtatttgattgggattgcactgagcctatacatcaatttggacagatttgatatcttttcagaattgagacttctggtccacacacatggcatatctcttatttagataggtcttctttaatttccctgaattaagttatatgcttttccctgtagaggtgttgcccatcttttgttggaattcttttaagtacttgatattattttgatgctgtcctaagaggcaactttaaaaaatttaagtttttagcctgttatttggtaggtatataagagtaaaaattattttttatattgctttatatgcagcattcatgatatctccatgtcatcaggagccctggcagccatgcacacagcttcctgcccccttgatcctgaagagtgtgtaaggctgctggggatcggatgcagttatgtaaggggtgtggatgcagaggagccagccgtggtttcatgctggtcttgagtgtcattctaatcatgaggccaccttacacccctctactccaggacatcccacagatcagaaggctcatgggaacccagatggagaaccagctcctagcactggccttccccatttatcttaactggtgcatttccagggcagcagggctgcaagagtcagccctacagctgtctgcccacatgcctgggtcgggggaagttttgggcttcatgtcaattcttgagttcccgagagttcgtgtccaggttgggaataacttgtcccacaaatgcctggtagaacttgcccataaggtcatgtaatccgaaagtgttgtttgtaaaaaaatttttaaagttctgatttaagcttttaagatggttttttttttcttttttctttttttttttttttttgagacggagtctcgctctgtcgcccaggccggactgcggactgcagtggcgcaatctcggctcactgcaagctccgcttcccgggttcacgccattctcctgcctcagcctcccgagtagctgggactacaggcgcccgccaccgcgcccggctaattttttgtatttttttagtagagacggggtttcaccttgttagccaggatggtctcgatctcctgacctcatgatccacccgcctcagcctcccaaagtgctgggattacaggcgtgagccaccgcgcccggccggttttttttttctttttgagtcagttttggcaagttacattttaagaagactttgtctatttcatctaggtttcaaatttataggcataaagttgtttgtaacatcctcttgtgatctttttaaagtcaatgggactgtagtaatgtttcctttttattcctgacattgagatttgtgcgtccactcttttttgttgttgtttttttgagacaagatcttgctttgtcacccaggctggagtgcagtggtgcgatcatggctcactgcagctttgaactcctgagctcaagcggtcttccccgcttagcctcccaagtagctgggactacagatgtgtgccaccaagcccagcttatttaatttttttttttttttttgtagagacagggtcttcttatgtttcttaggctcatcttgaactccttggcctcgagtgatcctcctgccctggcctcccaaagtgctgggattacggatgtgagccaccatgcctggccccctagtttattttatatcttattatttccttttttctactttccttgggtttgttttattaccttttccgccattcttgagggggagattcttgagatgagtacttaccttattagttttcagccatttgtcttttctagtgtatgcacttagcatttagaaatgtaaatgcttaatggcattcaacaagtagtagtttttaaaaatatatttatgtatttcagagacgaggtctccctgtgttacccaggctggtcttgaatcctggctccttccgccttggcctcccaaagtgctgggattataggcatgagccaccatgcctggctggatatacagtatttttgttcagttcaaattattctctaaattttattttgacttgatcaatttattatttaaaagtgttgtaatttttaaacatagaagactttttctaggatttatttttgatttcttaattgcattttgatcagtagacgtctgtcagcagggcagtagcaggtgcaccgcacgtctgtagggggagccatccacaccgttgccatgtgcgaatggcgccccctcgtgttgtggatggtgtaggttgcaccgctgtgtgcacacgtgtgcatacatgcatgcacacgcttggaatttcagctgctctgtcccttataggcccgtgcgtggtcagtttttgtaaatgttccctgtgtacttgaacacgatgcgtgtctacagctgttggtgccaccttttatacgtgtccattaagtcaaatattttatttgtggtgtacaaatcatttacactttactgatttttttgactgtttctatcagtaacagagaggtgtattaacacttctcaccatcattgtaaatatgtctattctccttattagacatatttagatagaattctctgcccatttgtgcttcatttatattttgaggccatattgttgtaaaactgttgtatcttcctggtaaattggagtctatattgttgtaaagtgactctttatccctaataaaactttttgccttacagtctgttttgtctcaggatagttacaccagttttctcttggttagtgtcagtcttgtttatttgtccttttatataagtcaacacttctgtagccttgtatttttcatatgtctcctataaacagcttgtagttggattaaaacagatcagtctgatgatttttgtctttcagttggagcacttagtctacttacagccattggggcctaaatctgccatctcttttgtgctttctatttgtccttcctgtaatgtttttttaaatgcctttttatagattgaaaatatttaatttcttcccttttactatttttgaagcagtgcactgtttttctcttgtaatggtttcttagaaattacagtaggaatactgaaaaaagtacaacgtccgtcatgacctttattcttttcttagacaacccaagacttaggaaattatttaatccgtttgtttcttgtatgtgagtattgctgtgtacagtattttatttttaacatcccaagttaccatccttgttttcggcagtcattgttctttcaggctgatgcacatgcttttgactcttcgctctcctttcctttagcgtctcagaactttcctatggggccacctactttgactgaaagacttcagaattcttttctcatgacggtctactgatgccacattcacttcgttagtctgaaaatatcttttttgtttgtgtgtttttgtttttttgagacagggtctcgctctgttatccaggctagagtaaagtggcatgaccttggctcactgcaacctccacctcctgggttcaagccatcctcccaactcagactgttgtgtagctgggacagcaggtgtgtaccaccacacccagctaatttttgtattttttgtagagacggggttttgccctgtggcccaggcttgtctcgaactcatgggctcaggcgatccacataccttggcctcccaaaatgctgggattacaggcgtgagctcccatgcctggcctctgaaaatgtctttattcagtcataattctttttttttttttttgagatgaagcttcgctctttttgcccaggctggagtgcagtggcacgatctcagctcgctgcaacctctgcctcccaggttcaaatgattctccagcctcatcctcccaagtagctgaaattacaggcatgcaccaccatgtctggctaattttgtatttttagtagagatgggtttcaccgtgttggtcaggctaatcttgaactcctgacctcaggcaatccatctgaactggcctcccaaagtgctgtgattataggcatgagccaccacacccggcctcagttgtcattcttgaaaggtatttttcctagggatggaattctagagtgatgttttcttttagactttgaggacagctgggacctacaggtgcatgccaccacacctggcaagttttacattttttttatagagctagggtcttcctatgtggcccaggcttgtcttgaactgctgggctcaagcagtccccctgcctcggcctcccaaaatgctggcattagaggcgtgagccattgcgcctgactctccagcttatttacagtcctttccacggaagtcactgaagaattggataagtgtacagtctatacttttcatcaagcaatagataaagaggtagcagcagggtgtcatggccagggtgtcaaactgtgtggaagctgcagtccagctctggagctgggcttcatgcccatctccagtgccattctcttcgaagggccttggacctgcagccttcctggagggagagggtgaatagccaagatgcagaatgggctttctttgtaatctggaagacctacgcttaatgaagcagtgtcagtttgaacacttcttaggcttatgcaaacatgtttaggttattttagctgattgaaggcaaaatatggcctgacgctgtgatgtgcggcgcagtcaaatgcgtcagaccctggctgtgttcacagagtgcagcatccagactgagggcggagatagcctctctgctcatgagctgtctctaaagaagcgccctctttaaaaagattgcacgttacattggaatttattcaaggtgcgtggctgagatagtgaagggatgcaaaccgtcatctgaggaacttaagtcagggagctgggttgtttagtgtggagtaaaggatctttcatgagtgagtggttgggggggtggtacatttcactccagatgtcaacagtcattgcgatgttggcactgctttggtcctgagtttcaagggaggaaattgaaggcttgagaggtgaagtaatttgcagaaggtcccctgaactcaggcctgactgtctccaaagtggcgtgtcagctgagggaacacagggtatcttgcagtcgtgatttctgatcaacacaagctgtccagcttcccaacatggccaaacaacaggacagacgtggctgctttccgtgggctctgttgcttctgatttatgtgtgtcttttctctttgagttgaagcattagaaggtgtatccaccaagatccagtaaagaagacagaaaacacaccaggtatctcaaccaagcggatttaggtggggaactggttttacaggctttcgaggggctgaaagggccaaaaggaaaccttgactgagacggtaactacaggaggcaggtgctgctgctagggctgggggaacaaatagaagaggctggagttacttaaatctagatggctagagaagggacccagtgagctggggcttgggccactgaggtagggacacagcctggcgcttgctggcaccgctgctaagtgcacagtgcaggggcctgggagcagaaggaagcaggagggcatgggggcggccggcagctgggaagggaaccatcctccctcctcgcctgccagcctccctggagggtgctggacaggtttgaacttcatgtggtagcagtaattttaaggttttgttttgtccccttgcaactctccttacttgctttgtccccttgcaacttataactaccttacacaggtactctgcattggtactctgcacaggtactcggggttattatttacatatgggatctgagcctcctgtgctttgcccgagttagggcctcaaggactttgtggatcccttcctgatcttttatttatttatttgtttatttatttatttatttattttgagatggagtttcgctcttgttgcccaggctggagtgcaatggtgcgatctcggctcaccgcaacctccgcctcccgggttcaagcgattcttctgcctcagccccctgagtagctgggattacaggcatgcaccaccactctggctaattttgtatttttagtagaggcagggtttctccatgttggtcaggctggtttcgaactcccgacctcaggtgatccgcctgcctcagcctcccaaagtgctgggatcataggcgtgagccaccatgcccggcccttcctgatctttatggcaagaggtttttgccacaacaacacttcacacctgactgaagcccagagaagcccacgtcacgatggctggaggcaaggaagaggatctagtcttttctctctcccagaggcgggagccttatgtccacatcactgtgagcctgctggccttgcccaaggactattcttttaaactaagagagtaaattaagatatttccgaggggtctgggatccatgtaaatgaaaaagttcaaccttttttgtaagccatgttcttaaaaatctgcatgtggggtagttaagtgtcacttactagagtcgaggatttcagcgcaggtctttttgaagttctgagatgaacttctcctcctctttatacttctcattccaaggatgctgagtgtgggattattcctgatgcagtgctgcctagggagaggagcctcagcacggcatctatcatgggctgctttgcttctgtatttagaaagagaactagaattttaaaataattgacttacaactacttagaaaagaaagggccaaatactatgtgcaatcatggcttcctcacggtcaggcatgtttcctgatctcatctcctttttcaggagactctttggaaatacatgcatatatttcattattgggaattaccaataatttaaccacttttgtgctattagacatttaggttgcttctgattttttaatattataactcatgttatgatgagacagtgtataaatctttgttcagatttctggttattttctcagtatggtttctggaagtgatagaaataactggataaataataaataacctttaggggaattggcacgttttgcaaaattgctgtttgggaagtttgtcccattttatgtgcccgctcgtggggtctgagggaggctttttcctggctcggctgccagccctgggcattgccatttgaaaatacctttgcaattaagtagacgcttgaccgtttcattgttttaattatacttttcgattattagtgtagttgagtatttttacatatgtttatgggtcagtttcattatgtttaattgtttatgcccttcgtccacttgtaagtaaaacagtgaagagtgacccgtgtggggttttttgtgttttgttttggagacagggtcccactccgttgcctggggtggagtgcagtggcataatcacagttcgctgtagcctcgaactcctcagctccagcaatcttcccacctcagcctcccgagtagctgggaccacaggtgcatgccaccatacccggctaattttttatttttattttttgtagatacggggtctccctatgttgcctaggctggtctcaaacttctgagctaaagtgatcctcccatctcagcctcctaaagtgctggggttgcaggcatgagccaccatgcctagcctgtgtggcctttcatactaggtgaatctgtggccacccacatcctgagaattgttttgttcctcttccaacctagaggaaggtccccttggaagtgtggcttggggctctgtgattgaacctttcctattcatcattttcgtcagtgtgttggatacagatttggaaggcgtgattactgagtgctgatgatataaagctgggaaggacaggtactaatgtagatgaaagactcgtgatttactccaatcttgaaaggatgacatgctggcagattgtggtaaaatataacagagatactttgaaagtcctgcatttagtcttccctttctctcccttgctcccttcctcccttgctttctttcttccttccttccttccccctttatttgtcccatcaattgcgtaaatgcaggtaaacatttagccattcctgtgaaagccgctgtgtatgtggtggccttaatcattgtccatttttgggcctgtggatccctgttattctctgcagtggagactgcacatcgggccagtgcatgcctgctattctctgcagtggagaccgcacatcaggccagtgcatgcctgctattctctgcagtggataccgcacatcgggccagtgcatgcctgctattctctgcagtggagaccgcacatcgggccagtgcatgcctgctattctctgcagtggagaccgcacatcgggccagtgcatgcctgctattctctgcagtggagactgcacatcgggccagtgcatgcctgttattctctgcagtggagactgcacattgggccagtgcatgcctgctattctctgcagtggatactgcacatcgggcctgtggatccctgttattctctgcagtggagactgctcatggagcatctgattttcttctggaccttctattttgagctgcattcacagagcacacctgagaaatggtggccaaggggagtgatctaggaccctgagaaacctggaagcagctccccttagggagagttgcagagggctggggatgttgaaggagagagaaggctctggaggaacttggatactcctttccaggctgagaagtgctgccctgggcactagagagggagagctctggccatggcttctgagggccagctgcaagtggacactgccatgggacaaacagcctcatctcactcattgaacattccaggaggaactaaatgacccctctcaggatgtcacgggatttctatgttgctggaaagatgcttgtggtggaagcgtggttactaggtggacctggattcagaggacagctcagctgattcctggcttgtggacttagatgggttgaacctttaaacactcagaacatcagtttcctgtaaggtggggtaagaatgcgtgtgtactgtgattgatgtgaataaaaggagcactgttgccaagtccctgagtgcagacccagcaggttggaaccacttcttttctgttccctgaacaattggactgtgtggacgcagatcctgcttccctgagctgcacggccctctctgatcgcacatacatgtgtgcatctgacacatatgcttgagtgtgagggtgacagcggtcagacaaatgggcttttttttttttttttttttttgagacagcgtcttgctctgttgcccaggctggagtgcaatggcgtgatctcggctcactgcaacctccgtctcctgggttcaagcgattctcctgcctcagcctcccgagtagttgggactacaggcgcccgccaccatgcctggctaatttttatattttcaatagagacggggtttcaccatgttggccaggatggtctcgatctcttgacctcgtgatccgcccgcctcagcctcccaaagtgctgggattacaggcgtgagccaccgcgcatggccaaatgggctgttttaaatctattagaaaaatttttcacaatttttagtctctattattctttctttttttttctttttttttttttgagacggggtcccactctatcacccaggcttgacagagtgcagtggtgtgatcttggctcactgcaactttcacctcccaggttcaagcaatcctctcacttcagcctcctgagtagctgggaccccaggcatgcgccaccacgcctggctaaatattctcagttatactttcagtacacataaaggcagttgtcaaccaagctgtttgttagaaaatgctaactgtggtccctgtccactgcctctttcctgttttttttttttttttttttttttgagacagagtcttgctctgttgcccaggctggagtgcagtggcgcgatcaccgctcattgcagcttctgcttccttggttcaagtgattctcccctgcctcagcctcctgagtagctgggattacaggtgggcaccatcatgccaggctaatttttctacatttagtagagatggggttttgccatgttggccaggctggtcccaaactcctgacctcaagtgatctgcaagccttagcctcccaaagtgccgggattataggtgtgagccactgcgcccagctgttcactgcctctttctgaggcctgtcccacgtgggaccttgtgagctggtggaggcctcttgagggctggcaggagcctgtgctacctctgggcccagcacctatgctcccgggagccgtcccgcctcttgccttcagtcttcatctgtactgtgaggatcatccactggcctcccaacccggtagtgaagggggaataacaaggacgtctctggaaagtgctgcaggttcccctgaggaaagctattgtagagtagaaacgagaatgcacccccggaatcagctctccgatgatatgcaggtgcagctgcctccagccctgccgttggtcaggaggaggcaaggggtacctaatgtgctcttatttggcccatgatgagtggagaaagagacctttgcccaggtgtccatgtcactgaggcagtggcggagggtgtcccccagctctgcagtggtcaccctctgcctcctgtcctcgggcagctgcctgtggctgcaggcggtgaaggtgctgttggttgtttgctcccagacctggctgtggggcctgctctgcagaggtcaggggcatggcgcagggggacccagcagggagctggagccaggcagtgcgggctgagccaggccgaggagacccccgcttttatcttgagtgttgtcatctgatgctgagttctttctcagcagtgaaggggaatcagtgtcctgacttgaattgcactttgatggggtttttagtttctgtgtgttggatttttactgagagctctagagaaactagtcacctgggggtttcagaggagggttgtgaagtgctgaatttttctttgagcttttaaggtcagaactcaggggagctaaaaaaaaatgaaaaaataataatttaaaccttataaggtgactcataaataactgcctttcaagatgagtggaattcttctgggaaaaagccctgtggaaattctcctgaccaccgagaacaaagaggaccactgctataaaaacctccagaatcatcatctgcggatggagggaagactctgccaggagtgcgatttttcctttatgtgttactccgtttaccatgtctcaataaaatggcagagaaagtccttttcctgtgtttcatttttcccacaacctttccccttttgacttctttggggcttccccttatctgagactggcccaccgcagaattcagcttcacgggcctgtccggatggaacgtggacgccatcatgtgtttactgcttttatctcttagccacttagaaacattgttaccatgagaaaatgggaattatgctttgatccttgagttaaatcgaggctgtggtagctggtgagttatgaggctttattaaaataaatgatcttggatgtgttgggtattcactggcaagatgttaccagaactcaaacatttaagataagccacatattatttgtatggattcataaaatatagaaagagcgtgagctggctatggctgggttttgtatcctttcccccaactctgttacacttttctgaaagaaaatgagactttgcttttatgtgaatagctgtagaaagctagggaggggtgccatttggaaattgaattaaaaccaaattatgtaagaatgtggttagttttataatatcctgttcttgtttcagtgctttggtttattattattattattattattattattattattatttttgtttttttttttcctgagatggagtcttgctctgtcgcccaggttggagtgcagtggtgcgatctcgactcactgcaaactccgcttcccgggttcaagcgattctcctgcctcagcctcctgagtagctgagattataggcacgcgccacctcgcccagctaatttttgtattttttagtagagacagggtttcatcatgttggccaggctggtcttgaactcctgacctcatgatccatccgccttaacctcccaaagtgctgggattacaggcgtgagccaccgcggctggccggtttattattttttcctcagtgccgtggaggcgcacagggctgctgcacccgttagggtggccctgggtcctacagccccgggcacacggtgcacagcacttgcgtagggtggtcctgagtgtgcacgctgctacgtcgctcaggcttatgtgccttaagcagttgcatagtttaggcacagtgctgcttctcaaagtgaattctacttggagccacttatatatagattagattttataatgtgtaatatgaagaggagcctggaggtatacttaatttaggaattatattatttttggtttgggttttaaagtatttgaatgcctgttaaaccaattctgtagtggctagaggttcaaaatttgtagtatttatgaaaaatactcattctaagtctgcttccttttataatttaggtatatacactctctgttcagaattcctcaatacaacgcattaaatattgttccgaggtcttctgagccccgttctcagtggtggccgtgagctaacatttccacatctgtcacaatgttgtttgcagtttgtcgggaggcgctctgcagccaggcagatggaggggccgctaggcaggatgttgcgagtctgtgagggcatcaatcccccgtttctggcatagatttaattgtttggttcaactgggaagccatatattaacttctacttcaacccatcctgatctctccacagatgctagttttatacaggcctatttttctctgaaattgagcctgagagacaaaaatccacacttgggctgtcatagattttggtaaattgagtcttgtgactgattggtgcctcctgcctgccccgtgatcctgtatgtagtaaccacgtcgtgatcacaggtcatggattggggaaagttgcctccaaagatgtgggtgtctgtttttcactccactttccatttggccaaaaattcaacacttcagtttctgtttcaaaaaagtaacaaagaattaaaaggaaaaaagcagtaagaaagtttgggccatggtggtgctctggtacccgccttcctgtttctgcctgtgtcgctctggctgggcagggtccgggcatggcagccctcccctctctcctccccctctgccatgggggcctgtggttcagctgccaggcgggaactgaagagcagccccgggcgctgcagcttcctgtcctgcccatcacggtcagggacgccggtgtccgttccttctactccaagtctgtcccgagtttgaatgttcagatgccaccagcagctctttagggtctggaccaaacgtctgatttttcctctactaacctgatatgtttctcatggcctttctcgcctttttgccatgtgtgatagctgttcctgttccttggactggattttcacgggctcgctggcaagcaggtcctgcatagcatgctcagcatgtagctgtgctccgcgtctgccggatgaacacacgagccggtcatgggccacgtcagcaatgttctcgacctttgtaagcttcgagaatgtgctgtgtgtacagaaggacgcgcagccaagtatgcggtggaatatccagaaacaacacggggcttgtcgggtgcagacggggcgcctcaccggcccggcgcagccccgctcgcccctctggcctcccccgcagttcccctttcctggttgtgcagcatgcactcgcttgcctttttcttttctcacagttttatcaactgtttgtgcatccccgaaataatacagctttgcctggtgtggaaacgtatataaacattatcatagtatctgcgctcttttgtgtcttgtaagacacccgagatcgattctgttgccgtgtgtagcggcggttattcttgctgttgtcgtgagccattgaatacagtgtcgaacacttgggttgcccagtgtgtgtgtatgatgaatagtgctgctataagtgtttttatatatgaattttggttagcacctgtgtggattttcgggaggtagttgcctaggagtggaattgcgtagtaatcgggttgggttttagctgaggttgtttctgctgcaccacactccggcccacactgttacgcatttttactgtgttcattcctgtgggtatgtattatatcatggctgtaatttacttccccctggccccgactttgaaaagttgtatttatttatgagatacaatgtgatgttttgatagatatatacattggggaatgattaaatcgagcttattaacaaccatcaccacacatatgtatcttttttttttttggtggtgagaccatttgcaatctctttgcaattttaaaatatatagtgttattaactatagtcagcatgctgcatagtagatctctgaacttactctctgtccaactgaaggcttgtgccttttgaccaacatctcccctaccccttccacccactaacctctggtgaccaccattctactctgcttctgtgagtttcgtttttttagatttctcatgtaagtgacatcatgtggtgtttgtccttctgtggcttatttcacttaacgtaatgtcctcctggttcatccatgttgttgcaaatgacaggatttccttcttttttttaatggctgagtagtattccatggtgcatgtatatcacattttctttatccattcttttttttttttttgagatggaatctcgccatgtcgccccggctggagtgcagtggtgtaatctcggctcactgcaacctccgcctctcggggtcaggcaattctcctgcctcagtctcctgagtagctgggattacaggtgttcaccaccacgcctggctaatttttgtatttttagtagagatggggtttcaccatgttggtcaggttggtctcaaactcctgacctcaggtgatctgccctcctcagcctcccagtgttgggattacaggagtgagccaccacgtctggcctatccactcattttttgttggacaccttggtacattccatatctcggctattgtgaaccacactgcaatgaacatgggtatgcagatgtgtcttgaacatgccgatttcaattcctttggatatatatacccagaggcagaattgctggattctatatggaagttctgtttttcattttcattttcttcatgactaatgaaattacacaccttttcatactcttactggtgattttgttaggatcttttgtgatgtacctgttgaggatttttgcccttttcctgttgtattgtttcttattgatttgtaggaattctttaaacattctggataacgtccttttaaaatgtgtttatatgtggaacatttcttgtcctgtgaaacatctctgtgatgcaatatttcagtctttttatggtctctcttgataaacagaaatatgtagttctattctagtttaatgtgtaagtgctttccctgtgttttatgcttgtgttgaaatattttccaaccttaaggtcaagattttgtcccataatgtaccctaaaagcttcatagttttgttttttacatttaggtccctaacgagggtgactgccagtccctgtgtgcccagggcagtcctagggatgaataattaccatgtattaataatcacgccagtctatggcccatccggcattggctttgcatatggtatgaagtaagggcccagttttgctctgttgcatatgaattttaatttgtcccagctcctttcacttgcagggactatgatgactcctctgcaggccgtctttgcgggaactaagggctgagacgcgcctgggtctgtttctggccctttgtgctgttccgggggtacttctctctgtgtgccagcttcacactcctgtctctgtggctgctgatggtctgaaaaagcacatctccccatttggatcctccagagtttcttgactccctgtgtccctttgcatttccatagaaattttaaaatcggtgggtcaagttcactgagaggcagaaaaacatattgaggctttgattgtgatttaatcatatctgtaggtccatagatcatttaggcagagacttgacatcttttcaatattaatttttctaatttttcatgtagaagtttttcacatcttttgttagatttattcttagatacttttgttagatatattcccagaattttaaaatgctattttgatgagtcttagaaattgtgtgttgtttgttctggtgcataggaatgcagtatacagttttcgttttgttttttttcaatcgactgatttgtatccagcaaccttacagaatattttaatttgaatattcacatatttatttggatttctataaacacagtcatggtcttctgtaaataatgacagtccctcctaccccatctttatactttctctcttttttctatctgtgctacactgaccaggactagtgttgaataaatgtgggggcatccttaacttttttcttatcccaaaggggaacacatttaccctattaaatacgattttttgagctaatttcgtaggcaatctccatcagattaaggaaggtttctttcttgcttataagcgttatttctttaatgagtggttattgaattttagtaaatgcttttttgtgcatctatcaagatgatcatatgctttttctcctttaatttgttagcatggtaaagtaggcatgcaggtatgcgcacatgcgtgcacacagtgtctttaatggttgagctgtgtgttagcatggtgaaggaggcatgcaggtatgcacacatgcgtgcacacagtgtctttaatggttgggccgtgtgttagcatggtgaaggaagcacgcaggtatgcgcacatgcatgcacacagtgtctttaatggttgagccgtgtgttagcatggtgaagtaggcatgcaggtatgcgcacacacgtgcacacagtgtctttaatggttgagccgtgtgttagcatggtaaagtaggcatgcaggtatgcgcacatgcgtgcacacagtgtctttaatggttgagctgtgtgttagcatggtgaaggaggcatgcaggtatgcgcacatgcgtgcacacagtgtctttaatggttgggccgtgtgttagcatggtgaaggaggcatgcaggtatgcgcacatgcgtgcacacagtgtctttaatggttggggctgccttgcatttcaggtataatctgtctacactttttatgcatttctgggtttggtttaatatttttgtaactctttttttaaagtaagtgacctgtaattttttcctgtacagtttttgttgggttttaacaccaaggtcatgctattccaaaaatatgagtttgaggagtgtttttctattttttttctgcctctggcttttagcaagatttgtagaacttccagttactcatctgggtcttgagttttctctgtggaatgatttttttaaattatgatttgtttctaaaatgattatcatgtcttctatgcctttatgagtcagttttggtgagttgtgtttttctagtacttgtctttttctttgttacttaaaaagtttagtggcatagagttgttcaaagtcacctcttgtcaatgtggatagttctctcttttagaattctgtaccgtggttttgcctgcctgcctgcccagccccctcccctcccctcccttcccttcccctcccctctcctcccctctcctcccatctcctcccctctcctcccctctcctcccctctcctcccctctcctcccctctcctcccctctcctcccctctcctcccttcccttctgttcccttcccctcctctccttctttcttttctttctctccttcttttttttggagacagagttttgttctttctttccttcctttctttttttcttttttttttggagatggagtgttgctctgtcacccaggctgtagtgcagtggcgtgatctcggctcactgcaacctctgcaacctgggttcaagtgattctcctgcctcagcctcccgagtagctgggactacaggcgcacaccacaacacccagctcatttttgtaattttagtagagatggggtttcaccctgttgcccagggtggtctcgaactcctgagctcaggcaatccacctgccttagcctcccaaagtgctaggattacaggcttcagccaccgtgtccagcctttctttcttgattagtcttactagagcaggcatggggatgatagtgaaaatgttgctttttatgaataaagcacagaagtgtgtgcagtgcacaaacagaaacatcatatacctgcgatgtcaacatttcatgggagggggattagggaaaagattaggggaaagattgggcgataataaaatagaggttgagagtcactgcatgagaggctggttcttttcagggaaccagcttgtggctttgtggatcttctttgttatctgtttgctttcattctgtcagctttggatccttccttccttttactttctctgggtctgtcttcttgtgatggatgcttactcatcctcagctttctttcttctcttacatttgtattaatggctatacttttccctcccagtgcagctttgctttttcccactgggttttatttgtctctctcatttgaagtaggctggagcgagtgtggcctagttcagaaatagaaggctggtttggctgtagctgtgagtgaggaggagagcagtagattaggtaggagagagaggcctagactaaattgtgtctgggcttgcagacctgggtaaggaactaaatacaactcaggtgtgctagagatccgctgtgtggtttcatgcagggggtgttgtgatctgctttatatttaagagactagagtaagggatcgtaggggtaggagtggaagggagaagagtgctcagaggctgctctagtgcaggggcaagacgctggaggcttgccctgggtgtgatggcggtgggaggacaggttctggatttgtgtgcatctgggaagggaacaggatatgactgcccagttcagcaagctcgtttaggatacttttattgggcagctcattaactgttctctgtggcccagtggatctcagtaagctggagctttgtaattttcacttatctctatgattgtttagtgtcctaacagaatgggagatttatttgggtaaagagggcctagaaacatttaagtattcccgtgatgctggccataaatacagaaaatttggtgcagtatgtcttcacattcctacaaatttagtgtagttcagttctcaaaccatgctggtagtatcctgggggtcttcaggacccttttgggggtttgtgaggtcggttgctaggacaggcctgcgtttccctggcgcctggatctgcactgatggcgggcgcaatggcgggcagtgctgtcggagtcttagtggctcccagttgacccagtcgttgcatccatgatagcctcataactggccgcaaaaacacactacttgtgtcaaatctgggcccttctgcacgtgtttttaccccactgagtgcctttgcacagactgcgatctgctggttgctgagggacaggcactagtgggatccgggaggggcctgttggttttccccgtgggatgctgcttttccctgaaagaataagagacaggatgaagtgagcttgtcacttcaaggaaaacaactgatggcaattgttgccagtgataaaaattgagctttcaactgtaaattaaattagaattttaaaaaacctgtgtcttccacggtgaacttgtcaggttaccagcctgttctgaggcctgttctgatgagaccgcggcggccatgctgggtgtgtttgatgctgcagaagagctctgcacagctcggtgagcccatctttccacatgaccagtgcgtgctgttacaacaccatgtgtgggtaaagagccacttcaagcaccagctaggacagagggtctcaatgtaacagagtatgaaaaagctactgaaacagtttccttatccaacaaaccgcttgtggagttttggtgtgtatcaaacaatactgacaattatttcaaaagactacgtatacatgtgcagctccatatgtgatgctggattttcttcctgtgcttcagttgaatcaatgtattacagcagattaaatacaattgcaaaggtgagaatccagtgacttctattcctgagccagacagtaaagagatttgcaacaatgaaaaacattgccactcttttcactaaaattttttgtttgggaaaatagtttcatttttaataaaaatgtcattcatgttaacctgtaacaggctttttattgttaatttgaaatgaattaatacaaatgagaagaccctcatttcaatgtataacatggtaacatttggtagtgataattgggaaggggcgtctttggactcctccgtgattctaaagagtgtgaagggaccttgagactgaaaaatccgagaactaccggtttatagaagtggaagcatttagtgatattgccgttcgttcctttctttccttccttcctttctttttttctttcctctttctttctcttctcttctcttttctcttttcttttctttcattttgagacagagtctcgctctatcacccaggctgcagtgcagtggtgcgatctcggctcaccacaacctctgcctcctgggttcaagccattctcctgcctcagcctcccgagtagctgggattagaggtgcgtgccaccatgcccggctaatttttgtattttgagtagagatggggtttcaccatgttggccaggctggtcttgaattcctgacctcatgatccacccaccttggccgcccaaagtgctgggattacaggcgtgagccaccacgcccggccgtgcagttctttaaacgtaggaaatgacctttgagttttgagttcgataccagcgtttctactattaaaggtggactttctctgtcaatgttcttggaatcttatgctttccacgaagtccttgcacttgtgcagaactgtatccccttagccatgtgaactgcacggagcaacgctgttgcaggatttccttctgcctcactcagaacatatgtgctctgtgtgtgaagaagctcgtcaggctgtgagcacagcacaagaataaagcctttagaactcagcagagagaaccagccattactgaaaatggaatgttttaattaaaaatatccatcaccgggtggctcttcttttcctttatttctcaagtgtggcaaatgttaataacagtggctgcactgtggctccatggtaaattgccagttggtgagtaggatttctcccatgaagcttagagatgaacccctgcaacatctgttcttgtgacaacgaatcccttttttactttggcttatgcatatttcagaggttagagacaggaggctccttctaaaagtgttcagtaactgcctgggctgatgtgtgtgcctgagagtcagagagagagagggagaaagagaatgggggctaaggggaacaagaagggagagagagagagagagggagagagaatgggcactagggagaagagaaagagagagagagacggggaatgggtgggagcatatgaattcattggtaaccctttcactttcttttcttcctgtattaattgatgggttgaccttattaagtgggttgattttggggtttctactgcagtgtaacaatgagcatgcagatggattttctgattgtttacaaggaaatcaacctttacactagctccagcttttttcttaaacatctagttctattagaaaaaaagcaaaagcacagcagatagaagtcttgaagcctgcagtaaaacactgtggctttccattgtgaggacgtgcctgttctttattacacacaggctgcttctgtgatctgctgagttgggcagtgtcatcttagcagacagggtttttccccccccttagatggggtctcgctcattcgcccaggctagagtgcggtggcatgatcatggctcactgcagcctcaacctcctgggctcaggtgatcctcccacctcagccttctgagtagcagggaccacaggtgtgcaccaccaacatctggctagtttttaaaatatttgtagagaccagggctctctgtgttgcccaggctggtctcaaactcctgggctcaagcaatcctccaacttcggcctcccaaagtgttgggattttgggcatgagccatcgtgcccagtggcaggagggtttttatgtacatgtgcttgccctttgtcaggggggtggggtgtggctttggttttgatattttcactggtactgccaggctattttgattcttcttataggagtcttgaccgtcaaccacctgccatgctgtttgggatgcagtgttttgaggatatccctggggactttactaaatggacctatacaagttgataggccttgacaacttttctcttactgtagtttttgttttattaccatttaaaactaaaggctagggagatgagccgtcctagattgaacgtgcttattagcgtggatatgttgtgaagaaatgcacgttggaaaacatggtcctccagaagcaattaacttggcagctattttgtttacattttctatgattaatatttacattttattttaagaaaattggttttttgctgccttgatctcatgctcacattttcctggttgagattggaaccaataagtaaagaaaattgacctatcaacccttttaaatgttagaaacctaagtcagagagaactgtgttaaaagaactgtgtttatctttttggttaaacctgttgtaacactgtgtggttaaattttccctttgtgctctcttcccctaatcgttcaaaggatagtgggcactattaggttcgacttttttttttaaatgtttatcttagtggtgggtcctcttatgggctagtcatttgtgggcataggttggggtgtgcagggtttatggctaattataggatcatatgtagtggttctctgtgatcaggagaaggataccaaggtttctattttacttatttattaggttgtgtaacttttttcttttattcttttatgcttgatgatggtgttggtgtttaggaacccctgtttagaaagcattttggagaaaacctgatgcaattttaattttgatgatgtcaatatctcattagataaggccttgataaaataacacctttttctcttatttcaatggatccaaagagaggctagcttggaagtggagtggtggtgatcaggaagggactcaccaccacgccacagggttgtcacatattttcctcaaagcaaaatgtaatttcctcttaaaagaggatttagatcctggcattttagcagctgtttttaaggcctggagctttggtattcctggctgttttgggaggcagtgctggacagccgattcgttcagcaggtgttgattgtgtgctgacttttgtttggcagtatttggtctgacatgggagggagtttgcaagaagcttacagcatcatttcatatggttggaaccccaagtgtgggactagcacacctaaaacagggacgcacagaaagggaaggcagctgtgattaaaccttgaagctcgtagtaccaagctcaagcctcggcatttggcagtaggagaggtgcagaatggttgggagagcctcgtagaggggatggaacttgagctgggacttgaagaaggctgagagaagggacagggaatgcggagtttagggagggtgttcacagagattttgagaggaaaccgagcatggctttttcatggaactgtgtgagtgtctgcatggcttgggtggggatgactaacttgactcaaattactcatccctgggccagactgcggtagcctggggaccaggtgaaggaatctcaaccttatattgtaaaggcaatggggagcagtgaaagttttaaataggtgaaagataggctttgttttctcttttctttttcttatcctttttgtttgtttttgagacagggtcttaccctgttgcccaggctggagtgcagtgcgatctcggctcactgcaacctctggctcctggctcctcagctacctaggtagctggaactacaggcatgtaccttcacacccagctaattttttgtttattttttgtagagacaaggtctcactatgttgcccaagctggtctcgaactcctgagtttaagccatctgcctgccttggcctcccagagtgttgagattacaggtgtgagatgctgtgcctggccatgttttttttgtttttggttttttttttcctaaagattcatctgactgtatgtggtgtttcacacctgcaatcccagcactttgggaggctgagaccagttgatcccttgagcccagcagttcaagaccagcctgggccacatagtgaaatgccatctctacaaaaaaattaaaaatattagctgggtgtggtggtgcacacctgtagtcccagctacttaggaggctgaggtgggaggatctcttgagtccatcaggctgaggccaccgtgagccgtgatcatgccactgcactctagcctgggcatcggagtgaaaccctgtctcaaaaaaaaagattcgtctgcttgagatgtggggcgtgtggaaggaagtagaccagtggatacggtcacccaaagcatgatgggaattccagatactatatgatgccatttcaacatggaggagtagaaatggtgatgaaggtaaagagaccacagcagagaggcgtctagaaagaaattaatggctctgacaacttatttaatagaagtggtggggtgtggggcagcccaagataacaaatgtaattttcagggcaattcatggatggaggaagaatcaattcagatttctgggttgtactgtttttgatattgtattctaagatggtcattgcttcttattaggagacaaaaaggtttttaaaaatgtgaaggtcatctgcagttttttggggtgagagagtcctcaggaacgttcgcatttgcagatgcccaagagccttgagtccaagttgctgatcttttgcgcagggtggttctgccgcagtctgcgaggcttctggagggcctcgtgagcttgcagctctgtgatcctgctgacaaactggtttctttccacatgtggaatctgtgttttccctgcatggagcagtgaatggggatgtgaaaggcaccggacatgaagctgataccgtcacagtagaatccagaagagctgctcagtaaaacagcttatacattaactgttcagacgctagaaaaggcttgtattgcttattgaccttaaactttcttgattctttctatctatctatctatctatctatctatctatctatctatctatctttttgagactgggtcttgctctgttgcccaggctgaaatgcagtgttgtgatcactgcagcctcaacctcctgagctcatgcagtcctcccaccccagccccccgggaagctggcagatggtgttgtcctcacatggccacaggcaagctcttcttataatgtgaccttgacacttctgccattgtgagtagggtccctgttccctcccgttgaatctgggctgactcgggactgtagaccaggttataaaaggctctcccctggatctgctggggcgtgtgctgtgaggaaaccccgcagccatgcggtgaggccctgtgaaggtgagccaccatgcagtgattccagcccccagaagacactcacccccagacttaagtcttcccagctgaggccccctgagacctgtggcgccctttcctaattcttgaccatgggacctgtgagcataatgaaatgattgttttgtgctgctaagtaaagggaggtttgttaagcagcagtggataacttgaacatgttttggaagctggagccaggtgtggccataatcaaatcccaatgcctgcagctctggctttgggatggggtgttgggcagaagcctccgggcctccaggagagtgctgctggctgcctgaagggcctcctagaaggtaatagggtctagtattttagcctgtgggtggcacatgatgactgtccctgctactctgccaatgtgagaaggcactgcagacggtgtccaccacatgggtgccctggatttggtcctcagcaggctgggcttggcctactggctgccttttgcctaccccggaaggaaaggagggaacgtgtcattgcacgctggaggaaaggggccccttgttaggtggtggtgggaagcctggtgtcattgttgctgtgggaaagaggaaagtatgtgtgtatttaatgaacttgctcatctagtttaggagatttccaggcagaaaattcaaagtgccacctggcttctccttggtgtaaaggaagaggacttcctgggttcaaaaataagactgtttctcattcccagcctcttctccaggctcctcaagtgaagaaagggcttccggcaaaatgcatctggactgggctgtgagctccgttcctaaggcttcagattgagatccaagtgcagtgtctggcctttcagctggaggagaggcctgcagattcttgcattaaatcccgtctggcctctaagagtccaaagggcgttgtcatgccacagcctcttctgggagcccaggaggtaaagggcttgtctctttatgggtgtggcttgtctaatggaggagattatgagttaatacacaaaaaggccaccaagtgtttttaaagaaattatgtgtctgcctggactgaaaggagcagaggcaatacaaaatgaaaataagtctttgggcccccagacttctgtgaggaggaagcaggctgtgaaaatcacccagctgtaaatgtggggtacttttcatggaaaatgaagtatatctgagaaggcggagctgagatcccagaaaacaagccccaggtaccaggacagagccctgatggaggtgctggcgctgtgtgcctgcctcgagtggctgtcctgggtgggacattgtgtgtggggtgtgggtgtgtctgggtcagctctttagacctggattgggaagaacggggatggaagaggggtggacttgaggaactgcatgttcctgcacacaggcttctcagctgggcagggtttaggtgacgagaccccagacttcaagctgatagcagtaatcggacaggccttgggggccctggggaggtgtcaggttcattttgcatgtgggaggatgtgacgtgtggtggccagaggatggacagtggcagatcgtattttccagagatgaccgcagcagcatctcccgccgcacgtgccctctctgcagtgtaactgtgaaacgcctcccaagatgaccgcagcagcgtctcccgccgcacgtgccctctctgcagtgtaactgtgaaacgcctcccattgagaggcgaagttgctgttctttcccttggatctggatgggctgtgactggatgggaaatggcgctcttggctggtgtgctgaggacgacataccgttcacctggttctctcagaacccaagaccagccccatcggagaggctgccagaggaggccatgggaggaggtggtttctcattaacagcgaccaccactgtcagccgccagatgtgtgagtggtgaagcttctggtggtgccagtgccagccactgagccatcaccggcctttgcatcttgcctgctgaggacccggacattgtggagcagagacagggtgtcccctcccttcccttcctgaattcctgcccctgcaggaaggagaaaatgattgctggccatcactgagggttggggacctggctgtgcagccgcagcgccggcgggccgctctcccacatctcaggggcacgcaggttccgtgccagggatggctggtcaggccccgcagatgggcagaacttctcatcccacacatcccagccttctttaaacttccctggcagattattttatggttttgctgctgttggtgaagatggttcagtctttttttttttttttttaaatttatttttttattgataattcttgggtgtttctcacagagggggatttggcagggtcatgggacaatagtggagggaaggtcagcagataaacaagtgaacaaaggtctctggttttcctaggcagaggaccctgcggccttccgcagtgtttgtgtccctgattacttgagattagggattggtgatgactcttaacgagcatgctgccttcaagcatctgtttaacaaagcacatcttgcaccgcccttaatccatttaaccctgagtggacacagcacatgtttcagagagcacagggttgggggtaaggtcacagatcaacaggatcccaaggcagaggaatttttcttagtgcagaacaaaatgaaaagtctcccatgtctacttctttctacacagacacggcaaccatccgatttctcaatcttttccccacctttcccgcctttctattccacaaagccgccattgtcatcctggcccgttctcaatgagctgttgggcacacctcccagacggggtggtggccggacagaggggctcctcacttcccagtaggggcggccgggcagaggcgcccctcacctcctgggcagggcggctggccgggcggggggctgacccccccacctccctcccggacggggcggctggccggtcggggggctgaccccccacctccctcccggacggggcggctggccaggcagaggggctcctcacttcccagtaggggcggccgggcagaggcgcccctcacctcccggacggggcggctggctgggcaggggggctgacccccccacctccctcccggacggggcggctggccgggcggggggctgacccccccacctccctcgcggacggggcggctggccgggcagaggggctggttcagttttcttttctttttttttggtgggggggagttttataactttatttgatgtatttgatgatcagcgattagttctcatccacattgactgtctgtagatttttgaacatggtaacaggtacataggtaaccaaagtatagaacttatttggtgaatcttcatcctcattacattttctggataaccacgcacggatgcggtaggggacattccttattcctttggcccagacagctttgttgagcctggtgtcaatgcacacatctggagttgccatctccttcatgtcaaatttccgaatctctctgagtgcccaaggggcacgcttcatgaagcccactccgtggacgcgctggtgaatgttgatggtgtcttctcgggtcaccacctcgctgattgcagaatggccgtttttcttctcgccatccttttctgcgggagccattctgccgggtccaagttggaaaggaaaaggacagttgagttttcttgggttgtccattggatgatcatcccagatgggttctttgtacttctcgtgttcacatggtttagggatgtttttctgatgagtggtggaaagtaggaactattcatggtggctggatttggcgcctgtctccctcatcatgctgtttatttttgtcatgaaaaacatctttatcaataagattaatctcacttttacccagacaatgtaacctgtagacttcgttgagtaaaattggaaataattttaaatctaatttatcttgttgtcaaaccaagagaaacctatcaagaaaccgctaaagcagtgagagctcagaatgaggaggtcgtggcataaaaggtgatttttctgggagcttcacatctaggcgatggtctaatttgtactaagtgcgaacacgcattgaattcagggaactgggaaagcacgcgtgtttgaccctgcgcgctttgcaagaagctcgtgggggttggtgcatcctttgaagggttaagggaacgaggggtgaaaagttgattattgtttggttgtgcaaatgtggtgctgggtggagtccccaagaccacttcctgcttccaggatttactgggagtactcacaggactcaggatctaatactcatgggcatgatttattacagtagaaagataacgaagcaaaaccagctaggcgaaagggtgcatggggtgaggtctgaagggaaccaggcacaagtttctgaaagccccgcccccatggaggctcacaggaggggctaatttcccccagaacaaggtagaccaatacaaggtagtgaaatgttgccagccaaagaagcgcatccgagacttagcccccagggtttttactggaggctggtgacaggtagcctttgccaaaatcccagccttctggcaggaaagcaggcattcagcataaaccatattgttggaaaacagttgaggcacagcgaaccccacttactagttagggtggtgggaatcctccagaaatccaagtccgcagaccccagccacgggccacccctgtaagcagggctttgaaaggagggctgctggggcctgctttcttaaccctcttctgcacagataccaacttatcctttcctttctgattaatgtctctcaaacacagacgggggaataaaaacctgaaaacaagcgaatattgacatgtacatcaccactttcaatcagctattttcaaccaagtgctgaagtataatacagttgtagtcacaaaggggaagtagcaggtatgttgcaagaaaaaacttattagaattgtatgttaacttggatagaaacagaacttttctgagcttatgtgctgtgcagatacagaatgctggcagagttacttctgtgagaacatcattgaattacaattaaatattaagtacctataaaatatctttgcattacaaaagtggttaaagtaactttctcagtcttcataaatgtagatagtatctttggacaaaataatgagttagtcttttgatggaacaggagaagcaggagaaaattgttccaggagcagggttgctgacgatgctgtccctgttggtccagaaggtaaaatcctcctgtattagtctgttctcacgccgctaataaagacataccagagacagggtaatttataaaggaaagaggtttaatggaatcacagttcctcatggctggggaggcctcacaatcatggcagaaggtgaatgaggagcaaagtcgcgtctcacatggtggcaggcaagagagcttgtgtaggggaactcccctttataaaaacatcagatcttgtgagacttattcaccatcatgagaacagcacaggaaagatccatccgcgcgattcaattacctcccaccaggcccctcccacgacacgtggaaattatgggagctacaattcaagatgagaacacagagccaagtcatatctttttttttttccccttttttttttgagagggtgggtcttattatgttgcccagctggtctttagctcctgggctcatgtgatcctcttgcctcgtcctcccaaagtgctgggattataggtgggagccaccacacctggctgattttctcttatgggttggagtaaggtatggccaagacggttaagacgatccatgtcctgtgggatggcccatgtttcaccagcactcagatgccctggggctcggggcttatgggcagttttgctaattctcaaagttaagttttcagctgggtgaagaaggaagaaaggctgtttcgttgaactcagtgttgaggagagcagtgactgacagcagtggatgtgctctcatcctcctgcttttactgggagaggggctttgtgatggcaggtgtataacctctcaggttttatttcttttacattaagaaaaaagaaggtggggaggtggtgggtgacagagcaggtgatacgtgagagtcagtgaaaatgcactgctgggagctagagagcctgcgcagggtttttccgttactgtgtccgtgatgagttgaggaaaccgtgtctcagttctggaccatggccgagaggaagtgcatagtcttaagtctcttatctagtgatcatcaacacaaatggggcataccggctgcaaaacagagttgggtaccagtgaggcctagaccacctgggcgtttctcttccagagctacagttcctaggtgtaaaatagagctggtgatatacaccttgccaggttatttgaaaatgcaaagcacccagcacagtgcctgacacatgggaggcagtcacagacccatctgtgctcagttgctcatgacgaatgcccgttatgtctcaggcacggactagctgtgcagtaagagggagctctgagtcagacggagggtggatttgctctttgggcactggtgtagctctggatctgattgtccttcattatctaggttttggaaatgtgagtcattatgtaaagcttgaggtgttggtaggtgctaggtgaatcaagtgtggtggtggtgttttctatgcgtgtctcttaccaatagacttttgtttttgttttttgagatggcgtctcgctctgtcgcccaggctggagtgcagtggtgcgatctgggctcactgcaagttccgcctcccgggttcacgccgttctcctgcctcagcctcccaagtagctgggactacaggaacccaccaccatgtccggctaatttttgtattttcagtagagacggggtttcaccatgttagccagggtggtctcgatctgctgacctcgtgatccacccgcctcggcctcccaaagtgctgggattacaggcatgagccacggtgcctggcctttttttttttttttttttgagacagggctttctgagactccaggagtggtctatcatgccctgctaatttttttattttttgtttcttttagagatgagtgttatgttgcccaggctggtctggaactcctggtaccagtaaactttttaggaggtttccgttagcttttgaaaattttttacctgatctttaaaaatgaatgcagttgtgtagcaatttttaaagtgattgacagttttttcccaccctaccttttcttgattgaagcagttgattaaggattttgggagtggtcctattgtttcttgtatttttctgatttttgttttagtgatgacactgtgggaaatcatttgtcaggggcaaatttcaatcttctgtctgaatggatctgtctacttatctgtccatttatttgttcactactgtttacctgtctgtccaaccacctacctacccttccgtctggccatccatccatccatccatccatccattaaagttctttttgggggtgtgagtatccgtttaattgcactgcatatctacctacaagtcatacctcttagcaatcagcaggcaatgaatcgggccattccctggttgaaattcaacttgagatttctagagggagctactcaggttaaggatgcattatctaacaagaaaaatgaatctacagtaggtcgtattacagatgcagcacatgaaggcgcccacacattacttcttagcagctgagtgtgaggtgcatgcatgtgaggctcagaccccacggtcttagggcatccttcaacttttttttttgaagaggagtctcactctgtctcccagactggtcttgaacgccccccttgcctcaagtgatcttcctgtgtcagcctcctaaagtgctgggattataggcgtgagccaccgcgcccagctttcttcaacctgaaaactatttaaacattttattactctgtagctgttggcagtaccagattttatttacaactgaaggtagttttggatctaaaaccacagttttggtaatgttcaaaaaatggatcatttagtggttttaatgtcatgtatcaatcgttttcagagtatcttttatattgctcttctgtatatgttagcttactagttgattagtgtttctgtaacctgtcctgctttctaatctagccactaagtggttggatcaggatttatactcagctatgcctcctttaaaactgatgttttgtccctcatctccctaaagtttttaatggcatatatgtgtatatatgccatttatatatatatatatatataattatttttaagttcattttgcttttatatctccccgattttttgacattgtttgtttagagaaatttggccacagtttttagcactgggtgctgcaggatgagggctggacctgctgcttggagctgcagtcctcatcaggtacctgctcgttgtaccacctgcaccaccacccacatgctccccaattttttaaagttaattaaaccccgtactgaaggtaaaaatatgtatacataatttttattataatgctacttaaacatataaaacccaaggctaggcataaattccttatggttagaggaattttgtgcagctgtaaatcccaaacatacaaattcagtccaactacaaaggcagtaaatgaacacaattaatttaatgtgacaaaaggatgtagttttgctgacggtgtattgctaatgttgggtttcatgatacagtgtatttgtatttaagatttttgcttgctgtcacttaattcttttgattttgagagtgatagactctctcatttttcagtttactgagcagggttcccccactcctgccacctgcccctgcccgacggcgcagcacagtgacagcgacttttcttgtgtccatctcccactttgttcaaatggcagcaaataggaatttatgatctcatttccctcctttccttaggagaaaagtaatattctatatgcattattctgcaattttcttttttcatataacagaatattctcgaggtcttccctatgagtgcatggaaaactttgtgggccatcattggagttgccgtctttacagccgttgttttttctaacaatgtatactctaatctcattagaggtttgtcaccgataatccagattacgtcttctttggccctcaaacaaccctctgaagtaggtggcggtgggggtatcaggaagagaagaaactgagattcagagaggttaacggacgtgactgaggcgacagatggaagtgtgtggggacgtggcccaccctaggtctgtgtgcctagacaaaggctgggtgcattgctgccttctcagggccactgccgcctgctgagtccagcatgttcggggcactttccccccttcttggtgatggtgcgctgaggcccacccgcagtagctgaccgtgttggtcttgaccgtgttggtcttcagagtcctttggtgtttattgagtgcccttgggcagatgcgggaacaggtgcttctgcgcgtggttcagatggaaccgctatagtctgcagataactgagcacgaagctgagggtggtcagacgcctattagtcgcaaaatttgctgacccaatgtgagagtcgggaatgaacaatgccttttactgacctaggaggtgttacaatgacaagaagaagtcagagtgggcaggaggcactaggccaggagaggagagagttgggaggaggaagtggccatgctgcaggtgccctaacagatccagggaagcatggagagcacagcgcgacccgtgtggagagggcatcactagcctgcctcgggctgcagggggcggggagcacatgcggcgtgcagacctttccttaggtttgtgctgggtgctctgctctcaggcccacagaattctgcactgtgagcagcgcaggtcggaagaggcatttggaaatgacacgctctgtccaggaactgcagtaaacgttctagctgttaatattcttccttctggcagatggtgggtttcacactgagttaagtagcttcacgactgctagtggctggaagcttccagattagtagtttaagccagaaaacaatgttgatacgtcttgagatgtgtataaatcatttgatttggctgggcagggtggctcacacctgtaatcccagcattttgggaggctgaggtgggcagattatttgaagtcatagttcgagaccagcctggccaacatggtgaaaccccatctctactaaaaatagaaaaattagccgggcatgatggcgcacgcctgtaattccggctactcaggaggctgaggcatgagaatcgcttgaacccaggaggtggaggttgcagtgagctgagattgcactgctgcactccagcctgggcgacagagcgagattctgtctcaaaaaaaaaaaaaagtttaaggtgttggttgtgtgtgtgtgtgtgtgtgtgtgtgtgtgtgtgttaagagagccattgtaggctacatgcatgtggtaatagactttaaagggtaaatggaaaatggtagcttacaactgacatttagccaattgaaaagtgtaggccagggtgtagatagcacattcccctgcagtgcctgctgggtcctggaacgaggccttccagcaagtcggttctcacgtcaagggcatgtcctgagggttatggggccttggccatcagggagagaataaggttttctcattttcgacttcaactaatggtcatagagttgcttttcttttcatttattggtttactgtcctttcctcatcctcctctatctctgcgtcctcctttatctccagctcttctcctcctcctctttctcttcctccttctccttctccttccctccttgcatttgttcatctttaccacattcattatacacccagcaaaatgtgaaacctttcatttcctgttcctggtacatgcagcaaaagcttgattatacaacattatgatgatatagacagaaaacacgtctgaattgtgttcatggaatatgtagcattcccatggttgtcaattactgtagctcattacggtgagcaagtatgtcttgttagtaagaaggttcagggagttgagatgacggggctgagatgctgcctgctgtctccatggtatgggcaggtaatggtgcagggggcgtttatgaactggtgtggaggtgcctaatagggaccctgtgcttgaggaaagggcagaaggctgatggcctcgtggctgtactcccgggtgcttcttgctgggcggctctcactgagtgggagtgaatgggaagggaaacttcctgatgtgatccttcagctgaacctagggatgatctccacgacagtagaccctgaggagcaccccgtgccacccaccaggagaagcccagaggaagtgataccctccctgacttgttagagtgcttctcttgaaggaaagaaaacccagaaagttctttttgacttctgtcgtactgaaggtatcatcatcttagacaccaatttagcatgaagggaagataatgtgtcagacacttgaatattgttgcacgtctgcttttccaactgaattttcgagtgcagatatatgtgcagtctgtttaatataatgggttttcgatcttgtcctttcttggaaagtaaaatgctttttattacctggaaactaatttcaagcaatagattgcatttttcctgggagtcttgtggtcagttttgtttttccaatgcagattgcctccaaatctttattttgaaaacttttcacacaattggaagacctgaaagaatggtaccatgaacacctcacactcaccactttgacacaaggcttgtttgcattttgtcgtatttgctctttctgtcacacttttgtttgtttttgaatcatttgaaagtaagtagcacatgttattattattattattattatttgagatggagtcgcactttgttgcccacgctagagtgccgtgatgcgatctttgctcaccgaaacctctgcttcctgagttcaagtgattctcctgcctcagcctcctgagtagctgggattataggcacgcaccaccacacccaactaattttttatttgtacttctagtagagagggggtttcaccatgttggccaggctggtcttgaactcctgacctaaagtgatttgcccaactcggcttcccaaagtgttggggttacaggcgtgagcaggagtgagccaccatgcctggctagtgattttcttcctgaatactcctgcacacatctcataagaattcaaacatcattcacccgtctaaccataataccaatatcactcctaagaaaattgaccatacttccacaatattatctaaatagttcgtctatattgaaatttcttcagctgtttcaataacatcttttatagctgtttttttttttttaaaaaaaacaaaatctactcattatgtttgtttctttagtcttttctaaatgcagaggtttttccccccctgtaaatgacacagacttcttgtggaagggtcctgctgcttgtgttggagaatgtcccacttaggttttgctgagtgtttcctcatggcatcatttcacttgtcttttcattccctgcatttcctgcaaactggaagttcaatctagaggtttgattgtatccacattaagtctttttggcaagaacgcttcataagtgttgttgatgacttcacattgcattacaccaggaagtgatcagtctttaacttagaagatttgctctcactctaaaataggatagttttaaaaataggcatcttttttaagggaagtgttctcactctttcacccaggctagagtacaatggtatcatcatagctcactgtaacctctaactcttgggctcgagtgatcttcacaccttaccctcccacgtagctgggactacaggtgtgcaccactatgcctggctaattaaaaaatttttttgtagagacagggtcttgctgtgttgcccaggctggtcttgaacttttgagctcaacagatcctcccacctagacctcccaaagtgctaggattgcaggtgtgagccactgttgggcctaatatatgaatcttaatgtttactctgtcttcacacataactgattgtctagttattaaattctgtgttgtaaatctgacttgcttagcttccagtgtcgaattatctgaagccattctgattttcagcctttgctttgtggctcatttgttctctgaagcctgtgtcttatgtacaaagaaaggtgtaaatactcttcttcgacttttaattgaaactgatttggaaatcatttgtcacaacctgggcaacatagcgagatcttgtctctacaaaaaatacaaaaaaactagcttggtgtggtggcacccacttgtggtcctagctacttgggaggctgaggtgggggcatcacctgagcccaggaggttgaggctgcagtgaaccgtgatcacgccactgcactccagcctgggaggcagaatgagactttgtctcaaaaacaaacaaacaaaacttttgtcaaagatgtaaggccataatgtggatggaaattttaaggggaaagtaaaatatataagcgtgtatgtatagttataaaaagaacctaaagcatctcaaagtccatagtccgtcagcatcagcgtctgtccacagagccagggtccccccttggatgcatctcctgtaagatgaaggcccccctgccctggtgtgatgtgtggccttcagtgatcatcatcatcctgtccgagagtcctgctggctctgcttggagaacctggccactttcctgcctctgctcctggcagcctccgtggcccgtcacttcttgtttgcctgtgaattctctctccagactcgagtgacactttgccttgcaaagctttccccagtgctgtcagacagggttagttctaagtctttcctgggagatctgtggcactctgggcatttctggaaggaaacttatgtgtgtctcttgtccctggaagggacagggcacatcttgttcatcagggcaccgcagccccaggacctgactctgatgccacaagcatttaatgaagacgttcaaagtgaacattcagaatctctgtctcttcatacttcttttcttgtgcttatatttagtatgtagtaacattcatatatggacactttcaagaactaacaggacacaggtgctgtctatggttgaatgacgctgtgttggactcgggctgggctgtgtgttgtgtggacacaggtgctctctatggttgaatgaagtggtgttggactcgggctgggccgcgtgttgtgtggacacaggtgctctctgttgttgaatgaagtggtgttggactcgggctgggccgcgtgttgtgtggacacaggtgctctctatggttgaatgaagtggtgttggactcgggctgggccacgtgttgtgtggacacaggtgctctctgttgttgaatgaagcggtgttgagactcgggctgggccgcgtgttctggataagtggctgtggagcacgatgaagcgtctatcgcagcatcatctctgcacccagatgtggccgtgctgagtggattcctgccccagatcttgggaagaaggttggctttcctcctggtgttggtggaaggcctccccggcgacactgctgcactccactggggcctttcattgtcctgtcccttcctgacaaggaaatggctggacactctcttcatgtcagcacccctaggtgctgggggctcaaagataagccaggcctggaagacccacccagagccaggggagcccacccccaatacacatactcaccaagccacatgctgcggttgggggtcccagaggtgtgctcaggccagcctgtggggacagcaaagtggcctccccgagaagggggcctgtcctcagtgtttcagaggcctcaccttgtctcatgcttgaaatatttcctgaagaatgccatttttgaaatttattttctaaagaaaaaaaatccaaatattgaaaggctctgcttgaatttttgtcaacaattactatatcaagaaaatatttctgatttaggtggctccttcagaatatctgattcctgtgttggcttctgcgttgcctttgcaggcctgtgtctgtaggtgaggttttcctgttcagatggagctctgtggtggtaaatgtggccttccttgttttatgttacgtgtttctctcaacttcatgagatcagaccagatagagaatgttaaagaaaaaatatttcgggcaattagaattgcaagaatgtcaagaagaaatatgtgtagtgaatagcaggctgtagaaaccatctcactgctcagatcttaaaatctgtagccaagagaggctttgaagcacccagggaagatgcatgtgccactctgcattttgtaaaattctgaaccatggactttattgtagtgctcgctttgccgacagctgctttagtcgtcgataatccccaaggatacttgcgtgtgctgttgccttcgtcaccaggacttggaggaaactgcagtgttgctatttgttatttcacgttgatatttccttccacctttggccttgtcctgcggtaattcctcatttaggattcctttgaatagttgggtcatggggagagttctgacgttattttactaaggtgaggtttgctaagccatcattcttacgtagatggcagaaaaagccattcggagaaaatatctgagtctgttcccgccaggttaaatagaaaggggatttgccaaggatctccagaagacccgagagccggtccctgacgttatggtaggcttcaagggggcttctgtagctgctgagcaactgagacagtggaggagtcctagaagacctgccaccgcctcctgaagagccaggtgcctctgccacacagctcacagggtgctcacctccctgtggaacgggggcctcgagtctcagggtctagaattggatcttgtaggtgcatctgatcataggaacccaggtcacatgctggccccttagctgcaggagtcaggacacagtctttttttccccaccttagtaagctatgaaccgtagcataagaaattgtcaaatatatggaaggtgttaagaagattatggggaactacagatggcagatgtctgccgtggttccccatggggcatcttaatggacggcttattactaggttttcagctgtgcaagacctttgattcacccatgcctttcatctctgatacccacttagcagcacatgctgttacctattctctttgaaattgagatttctttcttccttgtcccattccactcttgccacacctagctcaggccttcttattccaccgtgacagcttcctggctaatttcccttcctccattctttttcttcccaagtaaatgttagcccttgtcattaatgttagacgtcatcttcctgaaaatatccatttagccaggtttatgccgtggcagctgcagtggggcccggaggcctttcttccaggcctctgttattggaatccacctcccgcgtctatttggagctatggggcctttggaacggcttcatgagatgcgttggcccaagcagaaggctggtacagaagcagaacaaagctctgagcattctgagagttttctgttgagaaatgccatgggcttatgtcttcagcctgcctgggagccctgcatatttttacttgccttggggttgatttgatgaagcctgtaccatgggtaacatattgctggataatgaagagtggaaggaaaattagccctgaatgaatgactcagtcccatgataatgtggctaattttaatttgcatcaggaatagtaaagctgtggcccagtgtgttatcaaataaatctctaaacagccttgaaatcaatccatttattgaaaattgaaaatctttttttttttttttttttttgagacggagtctcactctgttgcccaggctggagtgcagtggcacgatctcagcccactgcaacctctgcctcccaggttcaagcaattctgcctcagtctcccgagtagctgggattatgggtgcacaccaccacgcctggctaatttttgtgtttttagtagagatggggtttcaccatattcgccaggctggtctcgaactcctgacctcgtgatctgcctgcttcggcctcccgacgtgcagggattataggcatgagccaccgcacccggcctgaaagttgaaaatcttgttccatgaaataaattttagaaaattagccagacatggtggcgcatgcctgtagtctgagctactcgggaggttgagatgggaggatccgtttgagccctattgaagcaataggcttcactttgtatcttgaactgggaaggagtggagaaaaaaaaaatattagagccctttgctatacttactttacgaagaccaattatttgttggtttttaaggaccagagttcccaggagtaagtgaaacacgactcgatctcttaagtgtgcccaatactgccagcacaacattcctcacaccggtccagcttgctagttaccttggatactcgcccaagcttcagctgactgcgcaggttattttctatatcttcagggtataaaaacagttgtatagacatacatgcacaaccatgaaaaaaatttttgactattgtggtaaagtcatttttatccccacttctgcccccccatgcttatagaaataacatgtttatggtagatggaaagtgcatacacagaagggccaggtacaaagaagaaaagaagaatcatccacgttcctctgaagaggtcagaatcactcatgacatcttgtgttttcatttggtacgaccttatatttggaatcacagttgtgggtacagttttgtaccctcctcttttcagttatgtttgagcatgtcctgtgccatttaatattctttgagaacatattttttaaacagctctactgagatacaattcacataccccagagttcacccatttaccaacagagttcaccaacagttgcaatctgaaagtatgtttttgtaaaggacatatactattttatcatgtaacactgtttaatatacgccatttaattatgcccttcaacgtggaattttaggcttccataggatacagtttatcgtatttagattttatgctgttgaatgacttggaattaatttgtaagtgtagagaaaaatgaatcctagggctcagagcactgcagcagatcacgtatttttgctctgtgacaaagtatttttattttcactttttctttttttgttaatttcaccccataaggtgtttcgggtagaggcaaatcccacaagtatccttggggattatcgacgactaaagaacagcaaagaaatggttcctagctcctcacgcagtccttggtgggcggtgggctgactggctgcgcacgctaggcctcaaggtagaagcggttcatttagagacccccaggcatagtcgcatggcttcacacacccgcaccagggctgaccatttgtttttggaggaaccacaaaaggattcagtatggaattccttaagaagggagtttctttagtttgcttaaaatagttacaactttttttttttaagacggggtcttgctctgtcacccagggtggagtgcagtggtgtgatctcggctcactgtaacctccgcctcccgggttcaagcagttctcccacctcagcctcccgagtagctgggaccataagtgcgtgccaccacagccggctaatttatttatttttatattttgtagagacagggtttcaccacgttggccagagtgatctcaaactcctgacctcaggtgatccgccaggcttggcctcccaaagtgctgggatgacaggcgtgagccaccatgcctggccaaaacagttgcagtttctataataaactttttttcccccagaataaaactagcacctttaaagtgagctataacgattccttttatgaaacttattttgtatgcagttcttattttgactttcagaaatctaaatttctcaagggtctgtgatgttggaactaaactcataccaagtcccttgtgcagtttgcgtggtgcaggaaggggtgagccaagtgaggactgtagcactcacgtgtgcgaaggtcgccgtgggcgaggcctcctcatccctgaggccgaaattttcctcttctcgtttccttttgatcaggatgttctacaggggtggaggcagattttaaaagcagtgatacatagacagaatttggcctaaaaaaagagtagtacttaaatctaaatgaggcctctggctcaaggtaacgagctgagctcatagattcaagcacctctcccctcattcccaattcccattgaaatgaacaaaggaatataaaaatagagagtctcccaagctaacacagttgctgctggtgatgatgatcttgttttggactgcaggttttggttgcagaaattcagttggatgtgcttcctgcgggtttggtgctcactttgtagcagtgcttggggatggaagtgaggggcaaactggcttttccttctcttggacaacttggttacccgcctccccttccctgcgaggtatatctactctctttgctatgtgttctagtttctgactctctttataaattatgcatttgtgtagcttcggctttgctccgagtttctgcttgatgctgtgaatcctaatgagcgctcccgggaattgggtggctctgccttcagacaaaccaggggatagtgaatgttgtgacctgtgtggccagccccagtcttgctttgtgtttattttccacaactctcagttgttgatgttgggaggataagtgtgagccacactctcagtgtgggggacagaaggcagtgattgggctgctgaacatgtttaatttcttcattctgcatggtgacttaggtgtcactgcacgtcagcctgtgaatttatacccaagcttgtttgtgccacctgatcacctgtatctttttaaatatatatgattttatccaatcagttatgaaggaagactctagtaaggaaatcccttgtgatttgctttgaattctttgggaggtgacaggcgttaataggtttttcacctgtgaggtgacatgctctgagcttacaggccttcgagtggaggtgatctggtctgcaggccctgtgtgcaattctgaaacccagaagctctgaacgctggattatttccacagctcatttggtggcaacgcttggcctgagctggggtgagactggacactcttgattgattccatggagagtggaaatgttaacgtggtgagtgttgggtgctgctccaaaccctcctgggtgtgttaaccctcctgggtgtgttatgtgagatggggcagagggatcacattatcctttcaccaagctgaacactgtggaatttcaaaaccaagctggcaccaaaggagcatcaagaacactgcccaggctgttataataacatcaggaccccactgcttgacggcccccagcctctcccacctggaatccaaagtgccgtggagatctttgagccggggcacaggatccttaggcgtgtgctccagcctttagtgggtgcctccaggatggctgggaagaccagtcatgagtcagaacttcagaatctgaaaaatccttagcacctgagaggtcatctgtctccaccccctcactttaaggatgaggaaactgttcaggagggattgaaatttaccgtcatgtccaaggccatgcattgttagtgagcatttatagttttatagtttctcaaaatgatactcttttcaaattcaaaattaacctatggggatataacgatgtcatcttaaattacattgcattggaggaaaatgtcttaaagtcaaaaaacttatgtaatattatgcagtttttggcacattaaatttgatagcccttacattttaaacattctgtaactgttattaaaaaacattaatcaagagtttttgaaacgaggttgccatagaaatgaaaatacaatgccaaaaagacattttaggtatagctaagaatttaaaaacttactaaatttgaggccaggtgtggtggctcacacctataatcccagcactttgggaggcggatgctgccagatcacccgaggtcaggagttcaagaccagcctggccaacatggcgaaaccccatctctactaaaaatacaaaaagttagctgggcatgctggtaggcgcctgtaatcccagctacttgggaggctgaggcaggagaatcgctagaacccaggaggtggaggttgcggtgagccgagatcgtgccactgcacgtgatcgtggtcaacagagcaagagtctgtttcaaaaaacaaaacaaaaaacttaccaaatttgaaattaggctcacagtgttaaaatctgcagaggagcaagacgtattttttttggcttaaggatatgtgatagtactgtcttttgcccagttttggagttaaattggtagctagatattagagctaacacgttgttctagttcatgtgtgagtgtattcgcgaggtgcttttcttgttttctttaaaagtataatgcaggatgtagggttaggtgtgtattgtataaacaagatgaatgaaattaatttatttcttgtcttcattcttgtctttgtatagtgtagctactttcacacattccagctgagggccatgccttcctattgctggcctgtaaagaagtcagaaatggtctctctaggtagcatttggtgagtcaggaagaccacacttgctgacaggcacagtgaggtgaggcccctagccatcccatgggactaaaggatgattcttgggcttctattaatacttttgtgtaagggactcagagatcttcagagatacttttataattaactagagctactcatttgactgagaatgttaaattttaaaaatttaattagctgcatttgtagaggtggagggaatatgacttgtctaaaatgacagccgaggtagcagaaataggaatcagtcagaggtgttgggaatgccgtatcaccgccctgtgtcggcctctgccgcctccccagccccgagacgcagaggaggaagcagacccagcagccgcagagcctcttcacccagcgagcttgccctagtcctggctgccccacttgctcgctccctggacttgcagccgccccttactccctggattcctcgctgggaggggaacgccaccacctagttcatgtccctgtggtgaaggatgaagtggactgtgcgtctacactgcacggctcagggaataagcactagcacagggagtcaccattgatccgaagtgctgggactgagtcccaaacctggctgtgaatttcccgggggcaagaaagaacagggttgtgtgggaagttactgagcatacatcagcccagaaaaacagctctgcccaccttttcctggggcgcacggagcatgtggataaacggggagaaagcactgccagacaagccccagggcagcggcggtggcacttggccacgggagcagcaggtgggtgtctcagattcggcccgttaatgctgtttcttccacgggcttttgctagaggagcctaacatcagtttaaggcctattctctttgcagattagggacaagataagaagccagtggggaaccagttaagctgtggggaagcacaaggtctattagaaggcttcccttcccacagagggaccctgcagatgactgtaggcaaagccagcctcttcctttaggaagcaacttggaacttgcgccagggtttgaatcaatccctctccatattacagggcatgaaaggaacacccttgatttaaaagtgttgtgaggcaggtgttaacagctgttcaccatggccacaggaagaccacagaaacgtttccaggaaatgtctagttttaagcagtttatcctcaaaggctgagtttgctatacaataattgggatttgggattatggatactgatcacttaaatattggaggatgactaattaaatacagtgacttttgttgttctgatttttagtgctttctcctgataatagatgaaggggccatttgtctcttacgcttcataatggaggcttctgttacatgtctgtgggaagacattcttctcctagtatatccacggaggcagagatgcagttcctttagaaagtgatattattggctgggtgcagtggcgcatgcctgtaatcccagcactttgggaggccctgggctggtggatcgcttgaactcaggagttggagaccatcctgggcaacatgacaaacctcatctctaccaaaaatacaaataaaattagctgggtgtggtggcacaccctgtggtcccagctactctggaggctgaggtgggaggatcgcttgagcccaggaggtggaggttgcagtgagccaagattatgtcgctgcactccggcatgggtgacagagtgagaccccacctcaaaaatgaaacaaaacaaaaaaagaaagtgatataattaataaatttttttaactgttaagagaggaggcactaaaatgcttcctttttcctatacaactttaaattctgttttgaatagagaatcttatctcgatgtgataaagattgtacttaaaatcagtcgccagcatcattctgaacaatgaaacatttatgtctcatgaaaatcaactgcaaagatctccactgtcatcattttgttattattagtgttattttagaagttctggtcaatacgctaagatctaaaaccgaaacaggaggaatgatctattggaaagaatgagacagacttattattcttagataatatagctgtatactttcaaaacctgaaaagaatcaccaaaaagcaattacatttaactaagaatttagtaaaggaactaaccatttttcttatatatcagcaattatcaataagaaactgttatggggaaatacatatatttccctgaaacactcatgaaatatctggaaatcttaaaattaaaaattaaaaatacttttattggtgataattttttacattcatataatcaaatcagagtaattgagatacctatcaccttaaatatttatcgttttcttttttctttttattttttttgagatggagtcttgctctattgcccaggttggagtgcagtggtaccgtctcggctcactgcaaactctgcctcccaggttcaagtgattctcctgtctcagcctccggagtagctaggattacaggtgcacaccaccacgcctggctaatttttatatttttagtagagacgaggtttcaccatgttggccaggctgatcttgaactcctgatgtcaggtgatctgcccgccttggcctcccaaagtgctgggattacaggggtgagccaccgtgcccagcctatcttttctttatgctaggaacattcgaattattttctttaggtatttaaaaaatgatttattcatttatttatttttagagatggggtcttgctgtgttgcctaggccggagtgcagtggctgttggcaggcacagtcatttcacactgtaccctcaaactcctgggctcaagtggtgctcctgcctcagcctcctgagtagctgggaccgcaggtgtgcaccaccacacacttctagctgcttgaaatgtactctcaattaaattaatgttaaccgtactgtcaattaaattaatgttaactgtcatcgctccactgatttatggaacaccaggtcttaggaataatcctaataagaaaggcacaggacttactcgtgaagaaaactataaaaatgttactgagaacagttaaaggtacatttgaataaatggagaaccatattatgttctgtatagaaaaatagaatattatgaggatgttacttcttaacgttaagttaaaattaaacttcattgcaattttagttcagtgcaattttaataaaaatcccaatgggattaaaagattgaagaactgattaatttgaaaaagataagtgaatataaatagctaagtaaaattaaaatttgagggtgaaaaatgacccttccaagtattatgaaatataaagataaattagttaaattaatgtagtactagtagaagtattggttgataggttaatgggatgaatttgattacccagaaatagaattttgtctctgtgagaattaatacatatatctgtgcacacctgtgagtttggggcagattatttaacagggattgacacaactggctagttttatgagaaaaaattaatctttatcttgtatcatataccagaataacatccagacggcttaaagggtcaatgtaaaacagaaacactgtaccaaaatacatgtcttccctcactcagcaggtagttagcacctggtccaggccagggttttgttcaaatgagtggacttgagtctctagcccactgaggagcatccatgggccggagctctgccgggaggaaaggacaggtgtgatcgcagcgttccccagctggctccaccccgatggggagtgtggaaggtgtgttgaggggtatccagagaaggcctccccaagaaattgatctttaaactgagatctgaagagagagtcagagccggccaggtgacccgggggaggggaactcccagcagagggaactgtggatttgagggccgagaggtgagtgtggccaggccgcagtgtaagtacgaggaatgagtagtgagtagatggtccacggagagtgaacaacgcaggcagtgaaggcactctaggagaaccaggcagcatcactgatgtgaacgaatgtaaactaaatcaatacgacagcttttctcattaaatgattgatggttttaaataacaagaattttacatctggtttaatatctggtgggagtgtaaatttgtgtaattttttttgcaaaggaatttggcagaatgtattgagtgcgttaaaatgtttatatcttttgatcaaataattccatttctggagatttatcataaggaagcctgagaatagcccttcctgccacgtccctctcaccacctgtcccctttgctgtgaaaccctgccttcaaagaagggcgttactcctgcactagggctggggtagccaggtgacaggcggaggactggctggagggcaggtgggtagggaaggggctcaatgttctgggggacattttaaaagctggaaaaacacataaacgagttccatattgaaatatttatttatttttttctgttgtgttttcagatgaagacagtcagtgttgccttagttttgtgcctgaatgttggtgtggaccctcccgatgtggtgaagaccacgccctgtgcacgcttggaatgctggatcggtgagtatgcctccctcacgcgctgccacaaaggccgtctggccggctctggcctgggcggggctcgccaagcctgtggtctggtccaggggcccgtctccagctgtgcaaatctgaggggtttttctttctggagtcacatcacctttgagtaatttccgatgcgctcacctgtgattggtagtggagagagtgtttccagaaaaatcaatacagtgatgattattggcttatataattttctactttatttttttatttattattattatttttttgagacagagtcttcctctgtcaccaggctggagtgcagtggcatgatcttggctcacagtaacctctgcctcctgggttcaagccattctcatggctcagcctccttagtagctgggactacaggcacccgccaacacacccagctaattgttgtatttttagtagagatggggtttcaccatgttcgccaggatggtctcgatctcctgacctcgtgatccgcccacctcagcctcccaaagtactgggattacaggccaattttctactttattacacgcccggccaattttctactttatatttgttctgtctggcacacatagtatctatgtacacttaaaaaaaaaatggaatgactgatacctgcatggaaatgtagaagaggtaaatggaaccacttccagcaaagcatcacataatggatcatggcccataataataatggccatcatttgctgaatgcttgtagtgtgtcagacgccactggaagcactttacaatgctcacaacaaccttgtgtggtagggtttttgctaatctccatttgagagctgaggaacatgagacatagagattagtaatttgctcacggttgtcctgtagagctggaatttgaacctatgcagttcaagtccagagactgttttttttttttttttaattgtggtaaaacatagacaacacaaaataccattctaggaattattattattattattattattattattattatttttcattctaggaattattaagtgtacaattgaacgacatgaaataattcataatgttgtgcaagcatcctcactgtccatctctagaaccttttcaccatcccaaacagaaactctgtctccattacacaactcctcattcctgccttcccctagcccctagtaaccgccattccaccatctgtctctatgaatttgtcattctagggacctcatatcagtagactgatatttgtccctttgtttctgccttctttcacttagcataatgcccccaaagttcatccatgtcgtagcatgtgtcagaatttcattctcctgccgcagcctcgcaataactggacttataggcacctgccaccacgcccaggcaatttttgtatttttagtagagatggggtttcaccattttggccaggctggtctcaaactcctgaccttaggtgatccacccgccttggcctcccaaagtgctgggattacaggcgtgagacaccatgcccggccaagatacaatttatatacagtaaagttcacattttttagctgtacatttctttaagttttgacaaatatgtacagccatgtaacaaatgccataatcaatgtatagaatatttctgtcacaccaaggaagttcccttgggtccctttgtaatcgatcccctctcatttctctggcctctggaaaccattgatctgattttttccttttacagaatgtcatttaagtggcgacatatagtttgtagtttttgtatcttgcttctttcctttagcagaatttatttgtgattcatctgtgtagctacgtgcattagtagtttttttcctttattccatttttatggctccctcacaatttgtttatccatttactagttgacagacatttgggttgtttctagtttttggcaattatgaataaaattgctataagcacttgatctttgtgtggacatattttctctggttaatatttaggactgtgattattagctcatatgttaagcgtatgtttaaattttttttttttttttttgagatggagttttgctcttgttgcccaggctgggagtgcaatggcacgatcttggctcaccacaacctctgcctcccgggttcaagcgattctcctgcctcagcctcccgagtagctgggattacaagcatgcgcctccacgcctggctaattttgtatttttaatagagacaggatttctccatgttggtcaggctagtctcgaactcccgacctcaggtgatccacccacctcagcctcccaaagtgctgggattacaggcatgagccaccgtgcctggccaagtgtatgtttaattctttaaggaactgctgaactgtcggttttttaaagatctttaaaaataatgaatgtcttttatatttaccttcatatttattgttttgaggaccattcatttctttccgcagttccaagtttctatctggtatcataatcattctgcctgaagaacttactctaacatatcttgcagtgctggtctgtaggcattaaattttcctagatttctgtttggaaaattcttcattttgtctttgtggttgaaaggtattttttcggggtatgtaattttctgttgactcttttagcactgtcttttaaaacagtcacctgttgtgttctggctagcagtttctgagaagtctgctgtaattctttgtttctctgtatattttgcttcatttttctctggcaatcttcaagatgttccctttatattctcagtagctttatctataacctattagttttttgtttgtttgttttggaatttattctccccacccttttttttttcttttagagatgggtgtctctcaatgttgcccaggctgggctatacttgaacatctgggctctagtggtcctcttgcctcagcctcctgagtagctgggactatggatgcccagtactgcacctgtgaaatttattctttttgggtttctgtgagcttcttggatgtgtagtttgatgtcttcatttttgaaaagttcccattatcttttcaaatatttattgtttgttttctctctcttctgggactcagctctctatgtattgtgctgttagacattgtaccgcagctcttccatgtgtctctctcttctgggactcagctgtctatgtattctgctgttggacattgtaccgcagctcttctgtgtgtctctctcttctgggactcagctctctatgtattgtgctgttggacattgtaccgcagctcttttgtgtgtctctatcttctgggactcagctctctatgtattgtgctgttggacattgtaccgcagctcttccgtgtgtctctgtcttctgggactcagctgtctatgtattgcgctgtcggacatagtaccacagctcttccatgtgtctctgtcttctgggactcagctctctatgtattgtgctgttggacattgtaccgcggctcttccgtgtgtctctctctcctgggactcagctctctatgtattgtgtcgttggacattgtactgcagctcttccgtgtgtttctctcttctgggactcagctctctatgtattgcactgttggacattgtaccgcagctcttctgtgtgtctctctcttctgggactcagctctctatgtattgcgctgttggacattgtaccacaactcttctgtgtgtctctctcttctgggactcagctctctatgtattgtgttgttggacattgtactgcagctcttccatgtgtttctctcttctgggactcagctctctatgtattgcgttgttggacattgtaccgcagctcttccgtgtgtctctctctcctgggactcagctctctatgtattgtgttgttggacattgtaccgcagctcttccatgtgtctctctcttctgggactcagctgtctatgtattgtgttgttggacattgtaccgcagctcttccattgtgtctctctcttctgggactcagctctctatgttttgtgctgttggacattgtaccacagctcttccgtgtgtctgtctcttctgggactcagctctctatgtattgcgctgttggacattgtactgcagctcctccgtttgttctctcccatgtcacaatgagcttttgttagtctgctgataaaccagccaaggaaattctttttctctgatattgggttttttatttctagcatttccattgactattttagtttccatctctaggggaaatgcatattgcctgcctttccttctagagcctctgctgtgttcatcatagttaccttagagtccttgatctatagttcagaaaacagggtcagccctgagtctgagtctcctaattcctttatcatctcttgactgtaatttgcttttccttgctttttttgtgctttataaattttaattgcatgctggacattgtgtgtagaagaacaatagcgaatgaggtaagttgcatagtctatagtttagtaagtagttaactggggttagaatttgttgttgtaatggttatacccactgcaacagcactcttagttcttagagtgattagttggtgcttgtgtcagtcaaggttctccagagaaacaggggcagtagatgtgtgcctgcatgtgtgtataagtatgtatgtatgtatgcatgcatgtcttgtgatcttgaggcagaaatttcttctttctcaggaaaacctcagtttggctgttaaggccttcaactcattggatgaggcccccatattaccaaagaaaatctcctttactttaagttagctgattgtggatgtcaccacatgtatagagtactttcactgtggcacctgggtttgtgtttgattgaattgctgagtgctacggcctggcccagtggacacataaagctgaccagcacagtcctcgtgcattagggtgggtacaggcaggccagggggttttcccagggctcctgctccacccctagcctgagctgtgcctgcccacgtgcctcactgagtggtccctggctttgcctgtctcctggcacaggatttccattgctagttactcagcgccaggctgtggagtggtgggagttctctgtggtcctggtctctctttagtcttaggcaggccctgggcatctgggccttgggcgtagtgcggttgcagtgttttcacctgtcccccagtgatggcaaacgtctgcctcgattcagtgtagaattctgtgcccagggcgtgttctgctcctatcccaggagtaggctgttttgcaccttccctcaccccatcctccatgctcttcacctgtgtcttgggacagtgtgttctatgcccatggtgagcaaggtaggttttgtctgtacctcctcccactccccaggtacaggaatgtgtgcctgttcttgtggactgagggtctcctgctttgcttcctaggggaggaggtctctgggggcaggtggacttcaagcctctccacactctgtgctgcctccagcagatgcttctcatgaagtgggggtgcagtgggggtgcatgcaggagagtgtgagtgccccttgtgcctggaccccctgtgtttccacacggatatgcaagcgcacactggggcctcgaggacacattaccatcttagctggtttcttgtgcagacctgcgctcttcaaagatgggctgtgcatgtgcccgggctttctcggagaggacgggcctgtgggattcggtttgtctgccctgcggtctcagctcccttatgagctcaagaaaagtgatgatgtcagtgattattcagctttctcatgttgataggattggagccactctttccccccagctttctacatcctaagcaaaagcagaagttccctttattgctttaacaaaaactacaaattattctcagcctgggcagcatagtaagagaccatgtctctacaacaaatcagaaaattaggagggcagggtggctgattttgagatgacaggcatgcctgtagtcccagctactctggaggctgcagcaggaggattgcttgagcttgggaggtcgaggctgcaatgagctatgattgtgccagtgcattccagcctgggcaacagagtgagaccctgtctcaaaaaaccccaaattcttctcatctaaatctcatctaatctgaattggaaataaatgttgtttttcctgcattatttggctgtcacactatgtgagggtgttttaggatgacagttccctcaccccttccaggctgcttgtcccccacaccccatgatggagcagctgtgttttgtggctgatttcttcagatgctctcttggctcactgctggctcccggtgactgtgctggttgaaattgacttcttattagccaccatggactctttccacttcatccgtccctcgtcacagctgaatgtaatcagttattttctcttcctctacagcaatgcttatgttaggcttttcgaacaagccttcctcatgcggatccctgtgtgtgctccggggacgggacgcgcaggcccttcggggttgtgtaggtgtcatctgaggatccagttgctcttccctgcctgaggagcctgagcttttatcagagctcaccgccctctcccacacagtctctttgatcagtatttacacaatgttaatgagaatggaaaaactccatgcttctttcttggtgtgaaagatccagcaaatgagatttctaaaacttgagttttaaaagttttcctgcagtttaggaatatcgtctactttctaataatttcaagtgaattttgagtttaggagggcatgtgctttttctaagttggaaaaattttatttggcctttattaaaaaatgggtaggttcctggtcctggtgatggtggttttaacaatatggcataagagaataagaagcctagtgatttgaatcagcacatttgcaggagtgtgtagcagcccacttttattttttagtttatttacttgaaaatttttatttttgtgagataagaccttactctgttgcccaggctggagtgcagtggcgtgatcatagctcactgcagcctcaaactcctgggctcaagccatcctcctccctcagcttcctcagtagctgggactgtagatgtgcatcccccacgcttttaaaattttttatggagacagggtctcactttgttgctcaggctggtctcgaactcctgggctcaagtgatcctcccacctcggcctcttaaagtgttgaaatgaccggcatgagctaccacactaggcccatttttcattttgaaaaaaaagttccaaaagttgcaagtatagtactaagctgtttcctttctgattctctgagagaaggcggctgacatggtgcttcagcacctctgaattccttagtgtgtaattcctgccagccgggagtttctctttccagatgacaacgcagtcaccaaaatcaaggagcattcgcgtggacgtgtgactgccacgtaagcgtccgctgcatgcaggtttgccagtgtcccaggaatgtcctttgtagcgccaggatcctgctcagccatgcgccatcctaacttcctctcactcagtctgaagcagttccacaggcattccgtgaccctcctcaccctggcgcttgaaggtggcagtctctttgttttgtagaatgtctccggtgtctcctaatgattccgtttaggtcatgcttcgctggcaggagcatcacgcagagctgcctgcttcacgcgggctgcaccaggtgatgcggggctgtgatctatccattactggtcatgcagatcttctcacctgattcagctggcgcctgctggacctcatgtgaaattcccctttgtagttgataggtattttcgggaagaagtgctttgagattgtgcaaatattcctttcctcgtgactttcaatttcttcattttgaactcatggcctccattttcattcagtggatttagaatccagtgttatcctttggtgccgagcttgtctccctctggttgttgggaacccattgggccggcttctttggcttctgtcttgtttgcatcattcgtggagcatgtgcttactttgtctcatctagtctttttcccagcctcattcctcttagtggaatgtggtgttagaaactgagatctgggtgccaggtgttctctttgaactggcgtgctattgctcccaggacctctctcgctggacagagcaaggaaatgcatgtgtgtgcatactatgtatgtgtgcatactgtgtgtgtgcatattgtgtgcgtgtgtgcatactgtgtgtgtgtgtgcatactgtgtgcgtgtgcgtactgtgtgtgtgtgcatactgtgtgtgtgcgcatactgtgtgtgcatactgtgtgtgcatactgtgtgcgtgtgtgtactgtgtgtgcgtgcatactgtatgcgtgcataccgtgtgtgtgcgtactgtgtgtgtgcgtactgtgtgtgtgcgtactgtgcgtgtgcgtactatgtgcgtgtgcgtactgtgtgcatgtgcgtactgtgtgtgcatactgtgtgtgtgcatactgtgtgcgtgtgcataccgtgtgtgtgtgcataccgtgtgtgtgtgcatactgtgtgcatactttgtgtgtgcatagtgtgtgcgtgtgcatactgtgtgtgcatactgtgtgtgtgcatactgtgtgtgtgtgcgtactgtgtgcatgtgcgtactgtgtgtgtgcatactgtgtgtgtgcatactgtgtgtgtgtgcgtactgtgtgtgtgcgtactgtgtgtgtactgtgtgcgtgtgcgtactgtgtgtgtgcatactgtatgtgcgtactgtgtgtgtgcgtactgtgtgtgcgtactgtgtgcgtgtgcgtactgtgtgtgtgcgtactgtgtgtgtgcgtactgtgtgtgtgcatactgtgtgtgtgcgtactgtgcgtgtgtgtactgtgtgcatgtgcatactgtgtgtgcatactgtgtgtgtgcatactgtgtgtgtgtgcataccgtgtgtgtgcataccgtgtgtgtgtgcatactgtgtgcatactttgtgtgtgcatagtgtgtgcgtgtgcatactgtgtgtgcataccgcgtgtgcatactatgtgcgtgtgcttctctctgtacacatttgtctcagcgtttctgtacctctctacatgtacattcatgcctcctattccacctcatgggggttttccatatttgtagctccatcttctgacagtgacaaccttggtatcctttgtccttattgtattggctaatgtggtgcctcctcctgtgtgaaccctcttctcctctctgccattgctgctcctctcagacccggttatcctttgccatttcaccccaatatctgcctttctcactgccctggtccaacacccatatggtcacctttctgcagccacacctctccttcttcctctgcacgggctcagggcccagtcagacttgagagctcattccaggccagtgtggctcccatcatcctgagacagatgccagctttgcccagacccaccttgtggctttaggattgttgaagaagggattttagcattttcaacaagtgctttaggtttcaggcctggtcagccgagggaaggatgatacaccagtaaccaagactgggacgggagctgggctggctggcagatggtggggtaccatttcgcacatggtgaggtgcttgtaggaacctccaagcggagccaccatccagtggaaagtggatctggtgggagaagagggctcattgtagactagaggacccaggggaggtcagcgcctagtacgaactagaccagagggtatcgggcagaggcagggccctgagggtgcagagaggggtgccaaagaggaggaccagggtggttctggatgagtgcgtggaggagcttctggtcagcattgtcaaggctgaggtggtgtccaggctgattgtagcaacctgaagagtgaaggcagatgaggtggtgaagcttgtggggcagcttggccaggaaggtgaggagtggggtactagtgttggggctgggctcagtgatgggtttgctctgccttcctcaagatgagaatgacgggggccatggaggaagccaaaacagggattggtgcaatcaaattacttacaaacatgttaccgtttagaaggcagacctcaggattttatatttggtcttagcattttgaggtctattactagaaatcgagatttttgtgttaatcaagactccagctttattccttccagctgtgctacacatttaactgttttgggcctcagtttcctcatctgtaaagtggagctagtgatgccgtgtacctcatggcagggtgggggaattaactgggagcagagacctggtttggtgcagagactggtcctcacctccgccgccccaactctagtccctacttctaccccaacatcacaacacctcaaacaccccgacccctacgtcacagcgcctcaagcatcccgacccctgcaacactgtcttagtctgttgttgctgctgtaacagaatacccgagactgggtaatttacaaacaacagaaatgtatttcacgcagttctggaggctgaggagtctaagataaaggcactggcaggtctgttgtctcttgagggccctgtccatcttccaagatggggctgtaacactgtgtcctgtcacggtgaaagggacagaaaagcagaagtgtgcgtctagttccctccagcccttttatgaaacacgatcgcctcctgaaggccccatctcttcatactaccacattgggcttccgttccaacacgtacatttttggggacatattcagaacatagcactagccccagtatccccactccagatcacccacacccccgcaacacgccccagtaccgccactccagatcacccacacccctccccaacacgccccagtgctgcatggggagcaggggccaaggtgctgcatgagctgcttcctgaatccgtgcctcttccgctgctttctgtagggctgactacgaaagagggctgcagtgaacacacctcactgagccccactgccgggcatgtagccttgcaggacggccgctcactcagggttgaaggtctccagcagattctgggagtagatgcacggtgctgcttatttcgttttacaaattaaacatccaatatgcaggtagcaatgtgtgtgaatccccagtgctttatgtagaaccctgagtatggggttcatttttgggcagggtggggtggagcggaaggtggtctgtgctgatgtcagaggggtctgagaagcttgaaaaataagggtaactgtgtgtgcctgaaccatgcaggaagacagcactccttccagagatgagggagagcagacgtcatgtctgtgagcaaacaaggggcccatgcccagcgtggctctgggtgtcatggcctccctgctaggtcatccggatgaagcctggggctgtggagtcagctcgtgagaaatgggatccaggtcctgagcgtgctggaactggcgagacggggtcacagcacacacctgcgtttccagccctgcccctgctgacggccaagacctcttttcccacccctgctccgcccccctctggataataagttgctgttctagttcatagaagtgacacttgtcccttttcagagaagcaggggagaggctgttttgttttatggcccgacattaaatactacaacagtaatactaaaaacaatcctgctgaagagctgcgcgtgccccactcttggggaactctgctgtggcagcagagtgcggatgagctgcatgctgagcagggagtgtcatttagcggaaatggttttgtgtgccagctaatggtagctgtgtatcagaagaggtgagaatgcaaaggtttgtcagatgtgtggaaattctgtcatcccaagggaacgtttgggaggtcttagctttgtttttctcttcttaatgcaaacacgtgagcattaagagaccttgggtagatgagctgaaaatagtcgtgatcgcccttggcggcggctcgtgggtttacagagcacttgcacagacttcgtcattgattcttgcaaccatttgggattcatagaccagtcaagttggttaacagatattgattaggtggaaacgtatatgttaagcatagtgccatatacaaggaactgtaagctgtgctcttgctttcaaggcactgatagtacacctggggaggtaagactaggatccatgcagtagaacagagaccaatacgaggtcaagcttgaacggcctggaaggccagagaatgctgcggtagagacgtcagggcaggcagtgggaggcaagagcaaagagctgaaggaagagcatgagcccacactctgaggtccgaggggctgggttttcgcacaccagctgggctccctttgggcctggggggtcagtagcacccgttagccacggccagtcacagccgtatgctctgtgcacacagctctgtgcccacagctgaaaccttggctctttggggcttatggtttaaaatgctgttttcttttcttcctttcttttttttttttttttttgagacggagtcacataggctggagtgcagtggtgtgatcatggctcactgtagcctctacctcctggactcaagcgatcctcccacctcagcctcctgagtagctggaaccacaggcatgcaccaacacgctgattaattaaaaaaaaattattgtagagacggggtctcattttgttgcccaggtttaacatactgttttctctgccagttccattggtgtctcaaggtggtatctctgcttcccctctgaaggaatctgaaagaagggggttaactgcttggagcccacctctctcctgtatctactttccaaagtgaggacagttttttaaaacaggacatgttcatcccctcatatctgctgaaaatccgtctagctcttggtttttgtataatacagcaataggcaacacaggaacgtaattttgtagctatgtgaggagtgaggcctagtgttagaacggggccagactgtaaaagatctcgctcctgtacggctcccgtcctagtcccacagacgctgcaagggccgcgggtcccggccgaagctttcctgtcccagatgcctgcagctgtgtggctccaagctttgcgcctgagctgaggaagatcacacgcctctcactgtatacaggactaattattacaaaatagacagggatggcattatggttaggaaaatatagactcattaaaaatcatttctaatttcaaagtagcccctttgctattatgtattttctcagtcaaaaatgagttgtttaaggctacacaactaatgagtggcagagtccttgaaaaccacacagagaaatttgcacttcatctagtaggcagcactcaatatgtcaattaaaaatgtttattaagtgtctgctaaatacacggtacaaagaactacaaagattgtccgagcagtgagtgctggatggggctttcagtgtgaacttttcactgaaggatagcacacagaggaaactgcacctaacccgggtgtatcctaaactgatcatacccatggaccccagatcaaggaacaagatgaccattggcccagaagtcttatcttgtcccctttgggtcccctcccccagctgcactgctgggtctccactcttggcagctttccatctaaatggagcacacagcccgcactgtgggcttctgaggggaggggtcagcctgcgctcatcttcagggtggactgagaagagaaagactaggtcattggtggccctgtctgtgcctggggcaccactctttggggccattgggccagattgaggaacccagctgggaggtgggagagtctcagtagcatcgtgaagggctgcggattgggtgaacatgttagcagtggctggtggagtgccagctctttggaaggtgaaatggataggatgggtaatcaaactgggtacataggaagaagatggagaggtttaaaaagaaaaagctgcaccccttcaggttggctgaatgccagcactatcaataaccttggagcaagtcatttgactgctttaaacttcagcttgcccttctgtcccatgaggtgggttggaccaagttcctttcagtgtaaagttctaagtatcttgaaattcagaggggttatgctgaaaatcttgcaaataggaaaatttataaagaactaaaagttttatgcaaataccatttaccatctccttttccatccacctacccatccatttcattcatcaatttacccacacactcactcgccgctgaagtttcattagttctttcccagattccccttaaataggagctcataaaggaattagaagagaaatgttttataagacacaactacagttttacatttatgatctgtccacttcaccccacatcagactgatactgttgtcaataatatctatcggggaatttaattttagtttatttaaattatacttaatcaaatgctaaatgcatcgtttcatttgacctcattctttcccgtctcttcctctgcttctcatttcagctctcccacccactgccctattcttggaagggaaccatacaattaactgaccacagggattcccagtggataggcggttatagtgccatgtagctggtcacggcctggtgagcagctgacagtggtttcacccctcctgggtgggcaggtatcctgacctgagtcagggcagggagagtggggcccctgccaggctgtctctactaacgagggccgccatgtctctgcaggatgttgtgagggatgcagggaagtggctgcctcctgccaacactggggagagggtgggatgggagaagggcctggactttccaaggggtgaaatccaaggagggggtactccttgaatgggaactccctcccttcttcctctgtccgtggttcactggagagcatgcatagtgtgagccaccgctgaccgtcgtgatgcatggacagttttctgaccatagatgacagccgcgggccgcgaccatgctggttgctgcagttaagtatgggtgactgaactcaacgccttccagccagccctgtgcgtttactttgctcctcctcatgcatgcggcaaggtcgctctttggcatctgtttgttaaagctgttttttgctttcctttgccttgtttgtgtacttcgtggcccctattttttgtttttcagatcccaatccaatcctatcttgtgggtctgatcacagcacagttgatttgggtcactatgatttttttgagaccttagaactttgttcctgagagaaatgaagaccaaacatgtaacgtctgaagtcacagattacggattataacaaatttaccacaattcttccagagaagttagatattacctggtttttaccaagcttttctcagccagaggtgtccattgaattagaaccattgaattagaatttccagaaggttagggcctggcatctctgttttgaaaagcccttgatgactttgacctatctatgggcgaaggccctttccagttgtaaaatcttattaacgtcatgatttttattttatttttttatcagagtaacatacatatagctaaaaaaataataattaaataatgccaaaaactatacaggtggctcttggagatcctgcgggtgtggctctagacgactgcaataagtgagctacatgaacgttttggtgtccagtgcatataaaagttacgtttacactgtactgtagtctgtgaagtgtgcagtagcattgtgtccaaaagaacatacacactttattttaaaaactgaaaaatgttaatgatcactggagccttagcgagttgtaatcttttagcatttaattggctgacggagggtcctgcctcatgtggatggccgccaactaatggaggaggggtggttgctgaaggtaggggtgactatgggaatttcttaaaataagacaataacaaaatttgctgcattgattggctcttgctttcacgcagcatttctctgtagcatgtggtgctgtttgatagcattttacccccaacagacagacctggagtagttggcagatgttttctggaaaatgaatgacatgagcctgtcacattaaggaaaacaactgacagtgtttgtttccactgataaaatttgagatttcaaataaaaaaaataaaatttggaaaccttgtacctaccactatgagcctggcaacttcttttttgttgttgttgttgttgtctttgagatggagtctcactctgtcgcccaggctggagtgcagtggcgtgatctcggctcactgcaacctctgcctccagggttcaagtgattctcctgtctcagcctcctgagttgctgggattacaggcgcccagctaatttttgtgttttcagaagagacggagtttcatgttgctcaggctggtctcaaactcctgaccccaggtgatccacccaccttggcctctcaaagtgctaggattacggtggtgagccaccacacctggccgagcctggcaacttcttagtacttaagacatttctgatgagctcatggtaatgttaatgagtgtggattcttaaaaaaatattggggaatgaaatatacaagatctgtatagttcaatgagctgatattttccagatgatcaatgcatgatgatacaaaataatctatgggtaaaaaatccactcaaggtgcagcaaacagcagtgaattttaatgtcatagcatacaaaaagttcgttgatgtggtttcagatactacatctcatataatctgaaggaaattaccacttgataatttttggtgtagtatcaaacaaaaagagtcatgattatgtaaaatagcattttaagatactcttctgttttctaatgatagatatatgtgtgaggtaggggtttccacatatgcagtcactgaaaccatgaaatgccacaggcgaatgcaaaaatggatgagagtcacccatccttgatcaaaccacatattccagaaattcgcaaaaatatgcaaaaatgctgctcttctactaaacttttttggaaaaaatagttatttttgtaataaatatttatgttaaaatataatgggttattgtttttaaaatgaatgaagaaaaatatttaaaaaatcttagctgaatttcacatagagtagatattgatagattcaacaacataaaccaaagctctttgaggttttcaataattttagagtgcaaaggggtcctgagaccaaacaagtttgagaactgctgatttagagttaattgccctggaacccactcctgaaataaatgggtaaatcctggacatgaatgtacatttgtgaaacggattttttttgtgggaatactgagtgcagatgaaaattaattaaaaagtatcacttctttgtctttttctctcctccttttcctgtacccatgagagccatagtttgaacaggaggaagcatatgctgtcactgcagagctgccttctcagagaaagcctgagcaggagcctgagaataaaacagtgcaagtgcgggaaagctgcaggtgccgaaatacaaatgaacgtgggtagaataacagcattcacttgcccgtgatgttaaaacactggccttcacggcgtgtcagcttgtttgagcaccttagctgttcagtaaatctggttaacactgatcaaccttaggcgttgtgttacttttagtcaaaggtgactttgaagtgtgttatataaggagaaactgtggaagagaggcctagcagaggaggaaatgcagacgtaaagaactttctcttttccattgcttcctcagatcctctgtcgatgggtcctcagaaagctctggaaaccatcggtgcaaatttacagaagcagtacgagaactggcagccaagggtaagtgtgcttcacttgctcttccctttccttcttacagggaaactccagttccttggtttccaacactctttggatccaagtgagaattctgtgcacaccctgcccttgtgtggcatggcgcctgcgcactgcgtttcgtgtgcctgcgttctgcctgctggctattggtggctgtgttgtcttgacagcgtccgcattattgtgagtcttgcattggacagtccaacttattttgcttaagtttgttccagatttttagaaaagaaaaagtattcttttcgctcttaaccatggttttaatttttctcaggaaatgtattttcgataatttttctgcaacctcaactagttaacgctattccgcgtgtcttcagttttcacatagttgagaaaaaaacacccaacagtcaaaagataacacttattatatgctttgcctttgattcaaaagataaggttctttttagggagccagttaccaattagtgtgtgggtttttttttttttttttttggcttatatcttacagttttttgtttgtttgtttaaagaaaagtggcttagaatataactgtgtcaaattgcctttaagatcttaagttacttgtaatccacccaaagacctttagcctttcttattaactggtttggagatttaataaatttaataaaaaactaagaatctgggcacttatggaagtgccctatattcagctttgcatgatagatggactcgagttacctaaaggaaataatgaagaatgcaggttgagaaggtgcgcgtctcctgcaagttttactctccccttttggatgaaagcctcatgaaaacacatgatttatggaaccttttgaacacttatttggttggaattttgatttgtggatcatttatccacatgatgtgggatttagagattccttatacattatttacattcttagagtaagagaacagccaaaaatgaattttttcctgcctttaaaaatgcccttaggtcatttctgctgttgcttccagtcatgagctaattgttaggaagcatctctgtgtcttagggtgtacctttgtgcttgcattgccaacttgtcaagtcaataacagcagacttttgttctttagaaggcagtggcttcatgggttcttgactgatgcctaatggcttgactttttcctctcttaaattggttgcctcttgatggtttgtgtacacatgctgtagcctttttcttgagggcgcagtgcgtttggggatggcatgaggactggagagagatttggatggtggagtcctgtaaaaatgtagttgagatgcctcgtgttttccatagataatagcttctttgaagactttgaaggtaccctagggtctcagcatggtgagacgggcacttgcaggagtgtggggcagagtggcagtattagaagacatggccgtgttggcacatggcatgtcgttaaccaacactatgggaattcagaggaatgcctttctggctacttctggccatctcctgggtttggctttgtacctttgcgttttactagatacctttgtttaaaaaagaatgtaacccaataaattcagatctaccaattgtgttctttctagaatgagtctctgctattaaaactagtttcttcttttccaagaattattagataaggaaatatagcctttcagaatacatgtgtttaatatttcaagatattgtatgtgtattccatttgctctgatttacaattgttttttttgagtgctaagagttgatttactgctggctttattattagtttcgcttggtagatatcagctagttgatgctagctgacaggaaatggaatcttctaaagtggcatctgttatttttaatctaaatttctgtctacgagcagatctctccatggcattgagaagcggcatcatgatgtagggaaggtgacctttacatgtaggtcagtgatgacagccagaaagatgacagtgtagactcagtacaggatggaggattccctgcccatgacagtggcacagttgtattcggacagcgagcacaggtgcaaaggggtgcagtcctctgaatgatctgtagtctgggaaaatttgttaaagttggccagatttcaagaatggatgtgcaaaataattctctgagtaagagatcgtttgaagggctggtgagatggagaatgtgttaagattacaggatgcttcggaaaaggtaccagcgcaggcgggatcccatctgggctggtttataaagtggaatctggaataaagtatccgctgcagcctagaaggaagctgttcttgcacacagagtgggatcttttgtccccattcaggaagcaaaaccacaacaatggacacctaatatttgcttttcgaatgccaacaccattgcattcattttttagtacaataaaaatgtttaaaaatttcctgctactatccatgagcgggcctcatctattttagaaattagcctaaggtaacggatgtcacaggatacctctgaccggctcccaggtgtgagcgtggggctgtgccatatgcactgggtaataatagcacttgccccggtgcgcgtggcacactgctcctcacagctttccgtgggttacaggacagagggagggaggcctggcatagatagcgtggctctcagtgtggggcagacctcatgctgccttctagagtttgcatgaaacaggaggcacttagcaaactcagatgtttgtgtgcaaggggcctggttcctgactgtaaatcagggtcctttgaaacattgcaaggctaaacacgcaccacttgattgcactctacagggctcttgagtttctgcagtaataaagagaggttgatgtgccatctgcaataaaacaatgggggcgttattaaatttcccagaccttcagtggaaagacccatatatctggttttctctttctctgtgtctttattgcaagagtggaaaaccttgggtcatttaatgaaaatgagattattttcattaaagtttgtcggagtcgttgcctccacgctggcatggatgggagcagagtaggaaatgcctgttttctcaacggtagcgtccatccaggaggtgcagaaagccaaccccggaacccccgtcggctgcaccagaatggtgtctggaagcctctgatgatttccttgctggtgctggaacgcttggacttgttcttcatttttctagcttttgatataggtgattccagttcaaaaggaattgagagaaaccatggtgattatatttttttctgaaggctgccagccactatctggcccgtatttccttgcttaggcccattgagcccttttctaaataatttatcagtttgccactgatgaaatgtttcttctgattaaatttaaggctttgccttattaccttgtaggtgtataaatttgtgttctgccagagattggaggaaaatgccgaccgttgtttcagtggaaaattctgcagtaaaacctcactcattccatcataagtctcaaatgaaagttttattgggaaatgggagtaggagattattataaagctgggaccatacagtgaagaatttatctttttagagaatttttctaacaaattggggctactggcagtttagtacaggatggaagttaggagctggagcctgtggaaaaagacaagcaggaggggcctcgctctctgtgtccttctttccccagagagagtggacaacaccagaagcagaggccacacctctttacttggggtgagctttaattcttctggtgccttaaaaataagtttctatgggaatatctatcatttactaaggaagatgaaacagcatggcggtgcctccactgaccaagtctgtccgtcgggcaggtgtgtctaggggaggaggcggaaggcgctcctcagtcatggagccacgttgttgtaggagctcattctcatcttgtccaggtctgcgagtagtgaaggcagcaagtcctgtgtggcggccgtggggcttccagggagctgagcggtcaggttgagtcagtttccatgtggtggacagttcttacttatccatgcacagccctggtttgtggattacagtgaacagattttgaatgtcagcttcccttcagttcaccgtgcttctcagatgtgtcacagttaatttgtggttaagggatgaaagttggttttgccattagataaacatgttttttatagtgcctaaccccaagcagagtatgttcaaggagagaacaaaacagctcccaagatctggtccattagcccagtagaaattgttattgcattttaatgtaaatgacagtcatcctttcgtggtattgataatagagttgtttgtgtgcttttatgagatgctttgaatgaaccgaagctgatgactatacctcctgttgggaggagggggtttggggagcaagggggttgagaaggccagtggtgggcagttttggttctacttaacaggtgtgtcttttggattttaggcacaagtgttatttgcagaactgaatgtttatgtgtaattccatgttgtttaggggtttggagtgaggataattggaatccaggcatcttctccttgtccctgaatggggctgctgcttgacctgtccacctcacagggagtgtcatgtggccatgtgtgacaaactgtgaaacccttggtattgagtgctcacactgctaggtgtggtgggaggcgcctagtcaggcagccgggttggctttggggagcactgcatggatggcttctaagatccacttgtcttctttcccctgggatgattagacaggcctctgctttgtgggcaaagcaattggtatcagcacaagtcactcgcttccttgtgccccccacccccaaatgttttggaatgaattttatagatggatgctgatatggcttggctgtgtccccacccagatctcatcttgaattgtcactcccacaattcccacgtgccatagggggaacccagtgggaggtaatcgaatcataggggcgggtctttcctgtgctgttgtccgtagtgaacaagtctcacgtccctgcacgagctctctcttgcctgccaccatccatgtaagatgtgacttgcgcctccttaccttccgccatgattgtgagaccttcacagccatgtggaactataagtctattaaacctctttcttttgtaaattgcccagtcttggttatgtctttatcagcagcatgaaaatgggctaatacagatgcagtcaagacgcataaatcagtgggttctaccttttcttaggattttcaggctcagatatggataatcggggaagaagcagctaagttgccctaggacagtactccacacctggaggtgctccaaagctattcatggaacagcccaaggtggaccgttactcgctgtgactcctgcttggggcattcacgttgcgacattagttccaaattgacagtccagttcagctggtgaaaatggccctataattgcgattggcagcatcccttggcgtgcggccctgatgccattaccattccatcatccatcccgtcttgctgtctgccctgccgccagccctccctcctcctgcccaaactcacctgactttcttctctgtgggtcctaaggttgggcttcatccaccttgagtttctgtgacaagctgccagtgaggactcatgggcaaaggcagaactgtgggtggatggctcacagcttgcataattcagtacctggtgtgaagcactttgcctgtgtactcattaaatttgcaggacggtacagacaatatcttctggtggtcttggggttaactgtggtgctttgacagtttcacttaactgcttactgcccagaaagttaagaactgttcctatgatcaatgtttttacttatatttttgccttggcctcagcagtgctctcccacttcgtcttccctcctttctagtgcttctcgcctgaaagcttttccacgtgcgtgccgtgttcagtgagaactctgattcatgctcttcagccagaagccttcgtagtcagccctgcccacgcacttcctgccttgccctgtccccagaggccatggtattggaagcagcttcctggaagcaagcttagattatgcgaagcagtttattccggactctttagaccaattgcaccagagcataaaggtgttgtcacctactgctatccctccgaataccttagtgacatgacctataaattcttttaggcacaccaaagacattacagaaagaagaatgaaagaaaggcatggttctgcagcctcctggaggatggcagcctgttgtgactagactcctcagggtttcagtccattagagctggtcccagaggggacccctgctggccagccctgtgttggactcttgctctccgaggccacctaggggattcactagagagcccatttgggattgaagagcacgcgtgttgactagagtgggttgcagcatgggccgcagcctgtttaaacactgcctagggaagattggtggagtccgcctcctcccttctgcctcgtaggtccgcagagtcgtgctgggctcaccgctccttccctttctgggcgggagcgcccctctcactggtaggggagctccctgggaaatgtggtctcctttctaccagtgcactgaggggtggggtggggagagcttaactgtggaaagaatgcgaactggtttagttctggctttgccacttcttagaaatgtaactctggacaaattactatttaaacttttaaaatttgtacatgcaaatgagagttaatggacagaataaaagtatataaagcatttgcaccagggaggccatggtggttggtcatcagatccttacttcccatccctttctgtcccttatcccttcctctccctcatggttgaggtggtggaggcccctcccagaacattctgcccaggagtcttgctgccttaagcccctccccatcctgccttatctctggttttatcctcttgcggggataactgcattcctgactcttcctctattaattgacctacttgaagtgtaatacttttagagagaagtaggggcttaactctgtccttaacaggcctctcgaggatattatctctcatcatcatgttccctttaacaagggagttgtctgtgtgtatgacaaattgcaaatgaggaccccccaccgtcaggctggggactaaaactgtagctcagctgttgtcgtttcacagatctcacgtgccatgtgtgtttcctgagttaacttggggaccgtgatacagagcgatgcggagatggctctgaaggacaggcaggtgccaggcgagggatggaagtgctgcttctaagtcagaaagtggaaggtgtgatgtgttaaagaatggaaagctaaatttggaggtgacgatgaggaacccaccgtatgctcgccatatgcaactaggaagagttgtaaaatcctgctccagccaaattggaaagtgctgatcaagggggaaacgatcaataacagattggagggggacggccacttcaaagtgtctgcggtacttgatttcattttgcaggggaaaccatatgtcacagtggtgttcatgaatttgggtgttcacaagggcttctgtacagctccctcccaaatgtccgcgatttacttgttggtatgacacataatggagatttttttaaaatggacatacgaagcacataacgtcaagttcaccattttaaagtgtacaacttggctgggcgcagtggctcgcgcctgtaatcctagcactttgggaggccgaggtgggcagatcacctgaggtcaagagttggagaccagcctggccaacatggtgaaaccttgtctctactaaaaatatttaaaaaatggccaggcacggtggctcacgcctgtaatcccagcactttgggaggccgaggcgggtggatcgtgaggtcaggagatcgagaccatggtgaaaccctgtctctactaaaaatacaaaaaattagccgggcgcagtggcaggtgcctactgtagtcccagttactcaggaggctgaggcaggagaatggcatgaacccgggaggtggagcttgcagtgagctgagatcacgccactgcactccagcctggggcgacagcgtgagactccgtctcaaaaaaaaaaaattagctgggcgtggtggcgggtgcctgtagtcccagctattccggaggctgaggtaagagaatcgcttgaacctgggaggtggaggttgtagtaagccgagatcacgccactgcactccagcctgggtgacagagcgagactccatcttaaaaaaaaaaaaaaaaagtgtacaactcaattggcttttaacatctttgcaatcttgtgcaactgtcataactgtcataactgtctagttccagaacacttttcttaccccaaagggaaacccaaagcccatcggcagtcatttctcctcccccaggcccaggcagtcaccagcctgccttctgtctctggagatgcctgttctaggtactccacacaaatggagccatacagtatgtggccttttgcgtctgggctctttccttagcatctggaatgttttcaagattcctccatgctattgcatgtatcagtaatttaatccttcttgtgtgtgcatgtgtagagatagggtctcgctttattgctcaggctggtcttgaacccctggcttcaagtgatcatcctgcttcagcctcaactctttctatagctgaaaaacattccattgtatggctagtctacatttctattttatgggttcatctgttgatggacactttcatggtttccaccttttagctatttgaataatgccgctatgaatatgtgcatgctagtgtttgtgtgggcccctgcccactagtggggttgctgggtcatatggtgaccctgtattttacctccctgaggcactcccaatctattttccacagtggctgtactatttgtccatgtctactagcagtgtatgagggctccagtctctccacatcctggccaacatttgtcactttctgtattcttacattgttattattatgatagtcctagtgggtatgaagtggaatctcatcgtggttttggttttcatttccctgatgattagtgatgttgccatcttttcatgtgcttattggccatttggaggagtctctattcaagtcctttgtccattttttagttgggttgtttgtctttattgttgagttctatgagttcaaaatggagacttttaagttgaataaggtataatttctgttgtgaggacttgtttcctttccaaataatatgtgtggtgtctgctgagagcctcatggtaacatttaattcttaaaagagcctttgtcttgatagattggtttcataaaactgttaagaggttcagccaggcaccgtggctcatgcccgtgggaggccaagacaggaggatcctttgagctcaggagttggagaccagcctgggcaacatagtgagaccttgtctctaattaaaaaaagaaaagaggttctttgactattgactatactgatcatatatatactgtataatttaataccaatcccttaagattcctgtgtgtttttgttaggagtcttttggttttcttagagctgtggtctctccacctggagtgtatgtcgggagaaagctcctgtcggggtgagtgcaggcagagtggccgaggagctgggcctctgtgaagtctgggtgcagcttggaggctcatagtggactgggagcttggcaggaggggcggtgcatgtccacaccagtgcccggtctccgccgtgctgcggccctgtgggtctctgctccccactcagcagttacgctgcaggacgttccttcccctccctgtgtgtgagggctgggtccttcctttctgatgtagtcatctttgatgggactccatctgcttgggcccaggggtccccacaggagccagctgtgttcacatcctagtggtccctggtcctaaaccacctcctgactttcctctgttgcttcagcttcagctctctgcccactgcattgtgtcgctggattttcaagattaaattccccccacaagagtgtttgatgcttccctggatggccaggctgtacggccagtgttaaaagacagacaagtgccacccaggggcaaggggagtgtgtggttcaaagtccctgagaacagatgccagatgccaggctcaggtggtgccgtttacttccagcaagaggagagagagggtgcacttgatccagtgccgggtgatggtggcccctaggccagggggtcgcaccctcactttgggctacagtagaaggagattcccccaccccgtggggtcttaaacacagaaaactgggggcatgcctgagggccactgatgcaggtgctaaggcacaacagaggagccatggaggcagaaatcgggaaagacccctcccaggtgagggctgcacgggctgtggtgagggtgctcccctcggtgggctctcggcccagcacgtggaagacggcgcagtccactgccttcccaacccagagaggccgatcagctccgcttagcttcacgtggtcctccgtgtaactggcccatctgtgggttggttctgagggagtgaggctgccctctagaatcacctgtgactggagggctgggtggcaggatttaaagcgcatagcagaaccgggaggattacccatggcttgtataaggaagagtctcttctaaagggttgcatgtgtggcaggctccttaatcaacatgctgcttaccccggactggaacatgccctgaagtcaagtcatttttgtgtagaatttttaattataagttttatttttataaacaaaaatcttagctgaagtccaataaaatccaagaagaaggcacagataatcagggagaagtaactcaagatttgaggaaatcaagagtcataaaagagtgctttgcaaaactttgcagataaattggaaaacttgtatgcgatgcataattttctaggaaaatataaatgaccataattgacctcagaaaagatagtaaagaaaaataaatggataaacatagaagaaagagaaagttaccaaaccattcctcttctaatcctcctccctctgaaggatttcaaacttgaaaagaacacaaaattattgaagacttctttctgttgtaggaagatctctaaaacatagtttctttatctattaatttagagacagagccttgctctgccatccaggctggagtgcagtggcatgatgttggctcactgcagcctccatctcctgggcccaagtgattctcctgcctcagcctcccgaatagctgggactgcaggcacatgccaccacacctggctaatttttgtatttttagtggagacagggtttcactatgttggccaggctggcctcaaagtcctgacctcaagtgatctgcctgccttggcctcccaaagtgctgggattataggtatgagccatattttttgttttttttaaatttatttttattgatttgtttttatatttttagaggggtcttgctttgttgcccaggctagagttcagtgatgcagtcagcttactgcagcctcaacctcctgggctcacgctatcctcttgccatatccttttgagtagctgggactacagatgtgtgccaccatgcccagctaatttttaatttttttttttttttgtagaggtggtgtcttgctttgtcactcaggctggagtgcggtggtgtgatcatggctcattaacctcgaattcctgggctgaagtgatcctcctgcctcagcctcaggagtatgtaggactacaggtgtgagccacagtgccagcttaaaatacgtcaaatttaaaatgcaaaagaagaaagtgtattcaacaggtttagtgtatgcacatatgactgatggagtcagccgttcctgcttgtcatatgtaatgtgtgtagctgggtgtggcatatgtgtacatgggtgggtagatccctagatagatggagggcaagtcggtggatctgcccctcctccactcactcagatgccttagagtgaacacggaagggagacatcagcctgtggcctccttagtcgttctcattttccttcgcctcttggtgtcttgctgtgttgactgattctagttttgaaagcagcatattgggtcaaaatacatttttttttctttgagacagagtcttgctctgtcacccaggctggggtgcagtagcgcaatctcggctcaccgcaacctctgcctcccaggttgaagcgattctcctgtctcagcctcccgagtagctgagattacaggcatgtgccaccacacccggctaatttttgtatttttagcagagatggagtttcaccatgttggtcaggctggtctcaaactccttgtaggtgagccacccgccttggcctcccaaagtgctgggattacaggtgtgagtcaacacgcccggcctcagaatacattttaaatcaggtctgtactgacttcagaatctaactccagaataaaatttgattctaaggggcaacagtaccacaaatgaggcgaagcacagaacatctgtcaccgtgacttggggcagatgcagaatgggactttcacctttttacacaaaacccttctatgtgccttctgttttaaaaccatgattttttttactttaataataggcaactaatttaaaatacctattcaccatgtgtcatctcagagtaggaaggggactgtgaggcagacggagccacttgggacttttgcctttgggttgtgacatttgtctgtaggttctttcacttctgtccatctcatttgtttctgtgccatgcgtgtgacatgatgagctggaaagactttgcatggggcccacgtgagtgctcacatcgaaggggcaagtgttaatcaccctctagttgacagagctgtttcagggatggctagttcctctgtccggaacacttgtattgagtggcagggagccgcggggacactgcccatagcggtgggagagcaagcaggaggggctctgcccagggctgtttcctttgcctttgtttaccagcataaagtattaaaacagctaaattatcatgggcattttaatccaatttctcagcgtttcgtcatttgaagaatagaagtctctttgttttcacagccctgttcttgcttgtttaaatttgaatatatttctattcattcagctgatagaaattctttacttttaaactgagggagaaaaaagaacagattgactagggatcagaatgtgatttcagtgggtctttattgggcccttgttagggaggggtttggacctggggacttggagtctacactgatggcagaagcaagctccagaaaagagcaggctccagctttgcaaggtaaaccttggagagtgtagttagggtgacagccagcacctctccctgctgagtggagagggaatccagatttttaggatcttataacctgatatttttcatgcctttgactcctgtcttggtctgttaggtcttggcttttgatagccaaagtaaccagctgactttccttctttttttttgaaatctcctttactttttcacaaggctgtttctcagtgtgaatatgttgctttcatattcccagagcactcactgaatgcataaaggctaagcaatgcagcagtgatactactaaccagctcttagtttactgggtgacctttggctggttctgtcgagtggccactctacctccagtttgccctgtctggagatgcagccaggactgtagattcccaggggagggctgacttactggggcatttatttactggataggggagtttttaatcttttagttggaatatttagtccatttacatttaatgtagttattgatacactgtgtatctggggttaaatccaccaccctcctatttattttagttttgtctcacctgttctttattttttctcttttcttgatttcttttgcattaagcagtttaaaaaattattccattttctccttctattagtgatgtatcagagaatacataagctacatatttgtttcgtggtaaccctaataaattactacatacccttactgtgagaagtgttgaagttagcacttgcaccacttggccagacagtgcaagaatcttgatgcatttaaccctcctacccacccccctttactttgcatggtgtcaacatcatggggttggagtttctatgtggattttaaaccccacagtatacagtcaatatttatttagatttatctgcttctttacacttattaatgttctttattctttcctgcatttctgtccttctgttcagggtcatgtttcttcaacctgaaaaacatcctttaatatttcttttagggtgaggctgccaacaacaatttagtttctgcatattttacctctatttcatttttgaaggatatttttgctgtgtgtagaattctatgtcaacttttttttaagtttaaaggtgtttttcccttcatctcctttctgttaaaacgtcacactgactgtaagtcttaatattggtgctttgaaagttccctccccgcacccccctgtccagctgatttggtttgtattactttacggagatgttcttagctgtggactacttcatatgtatcctttttggtgctccttgaacctgtggcttgatgtttctaagtactatcacttaagacactggttctctgccattctgtctcccctgctgacgctcattggaataggttagaccttttcaccatgtcctgtacatttctcatgttctgttccgagtttttttcttgctgtaggtcactgatcctctcctttgctgtggggcacagtctgctgtttagccaacctaccaaattcttgattccattgtatttttctattctgtgatttccattcgattctttatcaattccagttctctggtgaaaattttcaccttgttatctcttttcttgtacacatcagctttcagttctagccctccttacatcaacatctttgaaatggggggtgtgtgttgccatcagtctgactgctgctgatggcctggactcagctgttgctgtcagcacagtgtggacttgagggcatgactagacagaggccagtatttgtgccgagagccacagggctcacccgtggagggaatctgagtcccgattgtggaatggtggtggcagcatcacgtcctgcaggctggagcccatgagtggtccccgagagattgcctccgagcgctgttaggagagggaagagctgcactcatgcacacagggtgaccctgggtgaaatgtaggctccatggctccgagggggaagtgggctcagaagagtgggcttctgatctgaatccaagaagggttaggaataccttagccagtttctgtggctgctttttttcttttgaaacaggctctcgctctgtcacccaggctggggtgcagtggtgcaatcacgggtcaccgcagcctcgacctcctgggctcaagtgatcctcccacctcagcctcctgagtagctgggactacaggtatgcgacaccatacctggctaatttttatttttatttatttattttttttcagttggagtttctctctgtcgccaggctggatacagtggcacgatcttggctcactgcaacctctgccacctgggtttaagcaattctcctgcctcagcctcccaagtagctgggactacgggcacgcaccagcacactcggctaatttctgtatttttagtagagatgtggtttcaccatgttggccaggctggtctcaacctcttgacctcgtgatccgccccttggtctcccaaagtgctgagatacaggcgtgagccactgcgcccggaccatctggctaatttaaaaaatttttttgtagagataaggtcttgctctgttgctcaggctggtctcaaactccagggcttaagcaatcctcctgccttggcctcccaaagtgctgggatttgagcatgaaccaccgtgcctggcctgcaggtaatattcttttgtgtatatataagaatttaaatgaggccgggcgtggtggctcatgcctgtaatcccagcactttgggaagccgaggtgggcggatcatctgaggtcaggagttcgagaccagtctggccaacgtggtgaaaccctgtctctactaaaaatgcaaaaattagctgggcatggtggtgggcgcctgtaatcccagttactcaggaggctgaggtaggagaattgcttgaacccaggagatggaggttgcagtgagccgagatcgcaccactgcactccagcctgggcggcagagcgagactgtgtctcaaaaaaaaaaaaaaaaagaatgataaatgagaaacatgtctgagtaagttgataatagctcttcttactaagtatcagataaaaattccaaagagaaagtgttgtgtcgtgtcatgtcatagtttaattggcagttttttccttagtgacatagaagacagtgatggatcgtacaacctttggcaccttagagtttatgaaaaagtagcatctgttctatagaaattatggccacactctgaggagcagagttggggacaagagtggaaggaagagtctgatggtgacacggtctcctgcaggtcttcccagagccccattcaccacccatgatcactccctgccccgtttcccattttctttatattctacccttttgcggcaagggactaacaagggccatgcatgcctggcaacacaggcggtcccatccttcgctcaagccctaagtgacccctgctggccgcactcaatggtaactgactgctggaaggatggtcagccactgtccccaatgcaggcagccccttggtccccccattcccatcgttccccaccccatctccccacccttctctcagcaggagcctcccccataccaccccaagtcagcttcctaaaatgccctgtggctctggctcacctgctggaaacaaggcaaggtcaaggtcaagctccaacccccacccccagcccagctgcccttgggggttttcctctccctctgctgcgtttccttctcttgggcctgctcatctttctcgggctctttttcttctttgtctaagtcttactgccgacctaccacacttaaggttctcttctgctgccatcttctgtcggccctggcccctgagcacgggaccaggattggaagtggcaggggttgagggagttgagttagggtgtaagcgtggctgacttggtgaaatcttaagatttgggggagatctgaagtgccttgctctcaatgtcagtattgattgtggatgggttaggaggaggagaaaaattccaagtctcagcacaaggcgggtggctgtgaggagcagatgcagttcactattgcagagtcggagccggagaggcagaggtggaggccgctgacgccaggccagctctctaggtctcagcagaggagtcgcgcgggagccccaggactcactctccttgctcctagcaggcctcaactaacaacccttctccaccacggtgttgagccgttgatgggggtgatatgagcttgtagatgagttggggagacctggtgttttgcacccgtggcagtggcacgcttcttgggctgttctgctctgctttttatgtccgccgataaggtcggagagtctctccccggcgctcctatgcacatcttgttaagtttcttcttagagcttctgttgctgctgggaaagggatcccccaccaccccccgccccctttcttagtgggttcttaggatggcgcatgagagagttgctctttattgcctcctggttctcccagtatgggtttttatccatccagtggttccaagacagtggctgtgatgaacggagttgccgcgagtctcgtggcatttggaccctgcaccgctcgagattcactgcgctgcacaccagggcctcggtaattcagtcaaaacaacagatttagaggtgtacagaaagggccattctattttccattttgtatatttcatgtctctttaaatctcttaaagcttagaacacccgtttttcatatgcctttctaaaaacttttttccaggcgatttttagatgctatttatgtgtagtaaaatgcgtagatcttgagtgtttagtctgatgagttttgacagttgtatcctcctgcttaatcacactcaaagcaagatggagatcatttccactccccagaaagctccctcagccccctttccagtcagtttctcctggccgaggccagccgccttctgcctcctatcaccagaggctagttttgcccatggaactgaacgccccgatgagttcgtcttgtctgctgcacagacaaaaccaattcacggaggctgcaatattgtagtaaagaaagaatttaactcaaagccttgcaggtggaaggacgggagttttattattactcaaatcagcccctctgagaactcagagactagggtttttatggataatttggtgggcggggctagggagtgggtgctgctgattggttggggggtgaagtcatggggtggggaaaatggtcttctgcactgagtctgcctctgggtggggccacaggatgggtccaggtggggtcagttggttgccagaacgcaaaactctgaaaaacatctccagtcttaggttttgtaatgtgttgttttctacaggagcaattggggaagtcgcaaattttataacctggccacgactcccgagcagcaaggaattatagaaaggcaagctagggatgatggctgggtatcattagtgacatctacatcttagcagaattcaggcccctcacataatcctaatctcatggcctttcatagtcttacaaaggtggtttcagtccctgaaccaggaggggaccagttttagggagggactgttatcatccttgctttaaagttcaactgcaaactaaattcctcccatggttagctgtgcctgcatccgggaatgggtgagggcagccgcctgtgaggttaggagggaggtggaatcagccttgccagccttttctccctgtcataatcttgcccaggtggcctcacttattttttacctttttctacagtgaccacatgtgatgtattcttttgctcttgcgtttggcctcgttcactcagggtgaggcttctgagactcgtccgggcggcagctcattgctgggtgtcccggagcctgcacatccacgcagggtgcatccaccctccctctcccacaggttcacgctgcacctgtttccagtgactggcttttagggataaagctgccatgagtgttggggtgcaagtcttgtgtggaccatatatttttatttctcttgagtgtatgggattgcaggtcattgggtggttgtatgtttccagttacattttgcaagccactctaaattgacaaaaatgacaaaaatcatctctttctttgcaaagccaggcaatctgcagaggaatctttatttacagtttcctccagcactctggagacatggaagcgtaggcatcagtgagctgggaggtatttggttgtctttgaatgaattattaggtgagatattgacattatttcccctcaaacagtccacattcctgaatggcagggagtgaaggcagcctgtgcttatgtttgtgcttattatggagtgtgcacgtggatctatttaccgtgtggaaaataatagaatgaattgcttttacacattactgggcttaagaaatggaaggtgacatagcctttgaaaccccctctgagcccctccccagtcacagtcccctctgtcttcctgagctcaccctgtcctgattgggccttgtgccttcctctgcttgagactggttctgtgcgtgtgcgtgtgtgcaagcaggtgtgtgcacaagatgggctggcctgccctgctttggcacggaagcatcctccgctgggtgtttgttctgaggctcatctcacaaggatctgggtcctcaggctcccactgctctgcatcttccccgtgacagccgcgtgggcatttgctcttgaccctgtggtggctgagacagaaaccttggaggagtcactcacttctgttggagcaaaatgcaggcctcctccagggctgcgtctgggagggacttgggtggtggagtgtttatgacttagcgcagagggctcttacgtgcaaaccatcttggctgtggagcgccctgttgcctggaaggtctgccttctcatgggggctgggcttccagactcctgaaatgtgctgtgaggcttcctattctttcttaatgattaaaaatacgatttcttctttaatgcccagcacaaatgcatttagctgtgtttatttttttccctaagtaacagaagcaatcctgagaaaataattcttacactcagtattgattctctgcttcatgtgctagggtgttccccctcccactgaagttgctgctgcttcaccctctcctcctcgatggcctaccatcctgcagcctcgctccctgcgcctgcccccttctccttctcctccttcccctttcagtgcttgctcttccctcctttccttcttctcttcctcaccccactcttcccccttttctcctcctgcctctctttccacctcctcctccgtccctgctggtctcctaagaagcacttagtagcactcagaatccttgaccttggcaggcttgggaagtgttggttaatgaagggatgtgaagacgaagggagtctgagtctccaaaggaatcatggctgttgggagtttgcttgattaggagatgggccgtttattacaatgtgagttgttaactctaaagtgcctgagataaatttatagtgtttatttgcttcagaaggagttggattttttcttacaaagtgaaatatacttttctaaattttatgtttatataaacataatttatgttgttatagttttaatctgcattactcctcaaaaggaacaaaaatgttttggcttttttctccctgagctgcagagacctttttctcctgcttctgtcctctgtattctccccacccctttctccctcctttcttccctctttttaatctgtcaattaaaatatttgaaaggatatcactgagatctttgggcaaggactttacctgtttttgctgttgtcaaccgagggtgcggtggctcctcccacctgctgtctctggtttttactgggcttcctctccattatcctaattaggtggtttgccggttgttacacatcaaagacctgagtttcctggcgaggagggagggaggcatgggagcccctcattaccggcgtgcatcctaaccacactgcttgttttcttcttgagaaaatttttttcttttcttttccctttcctttcctttcctttcctttcctttcctttcctttcctttcctttcctttcctttcctttcctttcctttcctttcctttcctttcctttcctttcctttcctttcctttcctttcctttcctttcctttcctttcctttcctttcctttcctttcctttcctttccatgtcctttcctttcctttccatgtcctttcctttccttttcctttcccctttcctttcctgacagagtctcgttctgtcacccaggctggagtgcagtggcgtgatctcggctcactgcaacctccgcctcccaggttcacgccattctcctacctcagcctcccgagtagctgggactacaggcgcccgccaccatgcccggctaatttttttgtatttttagtagagatggggtttcaccgtgttagccaggatggtctcgatctcctgacctcgtgatccgcccactttggcctcccacagctgggattacaggcgtgagccaccgcgcccggccccccaaaaatttttctttagaaatgatataaagtatgaagaactcttggaagatcttcgtcggaaagatgaaggaagtcttgtttgtctcgtaaccctggaggccactgagtatctctccctcccatctgcctgtgcccgtgtatcctgcgtctgttgtgaaatgtttaccatgccttgactgggacttgtgggctgagcagggaggacaaacgttttatttttagtgactgtccctcaaagagctatactttcgatgcctttcaatatgaaatagtaaaaatcttgccatttgatattacctaaaatattactcttctccaaagttggtttgccaaaataaattatgtttattatctactctttctccttgatattatctaaaatattattcttctccaaagttggtttgccaaaataaattacgtttattatctactctttcttcttgctatgagtttaagaagactcttgttccctctccctcgatcaagcctgctgcagacacagaagatggagactagaagaagtgctaggacaagctaccgctgtcttcagggtgaccctgaagagttaggtccttgccgtgagtataggtgaggccgaaacaagtgacccggaatctaatcacagcctgggcagagtgtaggaagggcgcaaggatgaaaatgactgcttggttggacgcagcaaaatgttgattattggccatatatgcgtcactttgctagttgctgtggatataacaataagtgatacctcctactggcaaagaattctaagtctgatagggaaaataaacatcattcattcattcattcagcaaatgtttattgggattccactgtgcttcagcctctgtgagcagcgcccaacattgcccctgctgtagtggtgcagagcctcgtggggagatgggtggccgagcagtccgagaacccacctaaggagtggatggtaaactgaggcagcgccttgaaaggaagaatgctgtctgtgaagggtgatggcgagttctcttgaccagaagccatgcgaattactgcccgtgtcctctgatcgagccttctaggccactaccgtatcctcagagaaggctttatagtccagccaacagcactccaggaattgtctactcaaggaatgcagtaggtggcacttgttgagtgcattctgtgtggttaggacactgattcatcagggcctggattttcccaataaccccgggaggaaggcgttcccgtctccacgtccctttcccagcgtgccagtgctgatggtaggttctgctggatccctgccccggtgcatgttgatctttccagtacagcttgttgccccccagggaggcagggaagtaagtccataccacattggaagagttagacgggtcttggagaggctggagggggacagccgggggaagctccatagaggtggtgacgtctgagctgggagcgaagggagaccagggctgggcaaggtgggcaaagtgtgagcagacattccagtggaagccagaggagcaggctggactctgcatttgttcctactggaataaggaacaggtgtttgagtggatacagaataaggacttgatcgccttccttgctgacaagtgcatcgtgaggtgctcttttttctactcatcccactttcgaagtttctttttcttgactattttgacttaagatgcccagagttaataaagttgcataatttatcttcccatttaaaagatgtcagtggaagtcatagcaaatagtaagcccttcgcacccatgacctttgtttagctgagtctcttgggacaaagataacaagttgttgacacacgggagagaatgttagtattctttgtggtttcatgggacaaatatggaggctccttcatttgcttgatactaactgcagtttggacttaagcctgcagaggtgattggaaagattttcagtgaaatgagtggtgtaattgtgattgtgataatgcaggtgactgcttttcattcattcggttcccaccggcagcctggcatttagaaaaaagttaacctttctgtgaaatcattttagtgggaaaatccacaagggtctgccattctgtcagcaacaaaaatgccgtgggcagaacgaccttcagatgggattctggaaccacagggggtttaatgcaaacagatgacatggaagctgcacagaggaaacgtctggtttcaggcgcgggcatctaacctgccctgttcttcagtgcaggtttcagataccacagcagtaaacagttaccacatttcccttagtgtagcaggcctgaggggtagcggagaggcaggttgggcctccactagacaaagtttatcctagtgagttcttttgggttcaacttgtcaaggagggtggctactgagaggttgcctgataatctccaagtttcttccatctccatccatttttactcattactagcctttataaagtacagagtgagataattttcatcatgttcctaggctggcaggcctgggttctaagtattacttgaggtcatagagcaggcttgtgttctttgtagaaaggcctttgataggtggccgcaggaggtcttcgcgccctgtcccctcagcatgcacttgttctcccagagtcggccatggccattcttccaggcttctggagaaaggacctcctcacaagcagacagcaaaataaaacaatgaccagtgtcagagaagatgacacccccgtctcccatgtttgcacgcctcagcagttctcagccgtatgcctatgcttttacaagtgaaaaccagctctttaggtcacttgcgtcacagggatctcctcttttctgtccagctacctggcagtcattattcctcattgtttattgttagaaaccttttgttcagcagagcggctgccccagggatcacaggcagagcgggtcctgctggagtttagtctcaggacagcggcttgtccgcattcgggtttgagcatgagaatgttgttcccatgatttcagagaagaacaactgttttaaaggtcagattttattctgtccagtattctgtaaaggacgagttgaatatcaatgaaagaaagagctttagtagctgtggcagtgctgtgggtctgctgcctcccgggtgcttctcacaccacagaggctggagagccaggtgcccctgcagccagggctttgctcggggacacgcttgccggaggccaggctaccctaagtgtgcaccgagggaggtggtgggacctgcccgttctgctggctcagcaggagcagccaggggctgggggcttctggggctttctagggcgtgggaatgtgggtagggggcatttcccagctgctgcacaggccactggtcctggcctgccttccctgaaagctgagtccaaattcttcttctcttgcccttgcacggaatctgtaagtcacagaacacccggagtgctgcccttgctgcattaatagcaccagtggtttctggggaacttccctgacctcatccctgttgcatacagtagttcattctttcttttttttgagacggagtttcactcttgtcgcccaggctggagtgcagtggcgcgatctcagctcaccgcaacctccgcctcccaggttcaagcgattctcctgcctcagcctcccgggtagctgggattacaggcgtgcgccaccatgcccggctaattttgtatttttaatagagatggggtttttccatgttggtcaggctgttcttgaactcctgacctcaggtgatccgcccgccttggcctcctgaagtgctggattacaggcgtgcgccaccgcgcccggcccagtagttcactcttaaaacgccttgttatgtttctcccctgcgctctggtgacccccagacctctccatggagggacaatcttctgcaccaggagctcttcccctctgtggatcatctctctttcctcttcccttcctttttttcctgatacttctgatacttattcaaataattcattttttttgttcttcagtcgtcactttcatgtttgatttctgaatgcctctttaggcctggcctctgtctttgctcaaattgtgtatttgagacagtctacaacatcactcaggtatctttagatttgtcttgtctgagtggaattcatcctaaaattggaagctttagatgtacaagagatctgaataatagtttaaaaccattaccctcatctgaaagataaggtggtggggctgggacagagaaagtgacttgctcagtgaaatcgactgcagaccggactccgggtttcttggtttcttgttcactgtaaggtttgaccttaagccagtttcttgtcacaactgtctcatttccgaccataatacagagaacatcacctttaaattgtccctcttttatcaccatccacttagtcaccaggtcctacccgtcccttgtccgtgtcgggaatttgcgccttccctctcctttcccactccttgttctaattctcagtctttatacttaagcctcactgtcatgccactgttgccattagattttctgcttctgacctttttaagccttttaaccatccggagcgttgctgtcagcactcgattttgacatgacgcctgcccgctgcttcgtctttttctatttgtaccctatttttttgatggcactcgctacctctcacacactgtgcagttttcgtatttattgtgtttagggtctcttccccacttgactgtgagctgtaggaggccagaaattgtaatccatttggtaacagatgtacctacagctcccggccaggtggtcatccgcagtccacacacgcattcagctctggtatacgatagatgtgtagtgtagcagcacctggcgtttgcctgtagacgacacacagtagttgttgaatttgtgggacccttgataatcagccccccaactcccccccacattcatttctgattactctgaagcataaaccctccccggtagccacaagggtctcctcggtcaggggaatggattctccctggtcctaggggagcacacgctcgtccttgttaccctctctgtggtggagctgggttgcacactggaacttatcctcgccggggtcagtgatcctggaggtcggttgcctccatattgagcccctaaagcacctggccctgggaagagcgtgggccctggagcgtggcccagtatttcctcttctgttttgctgtatcctgaatttctcttctttttctttcatttctcagagtccaagtcacatcctgcttcctctgggctcaccatctctgccgtgttgctccacgggcccctcctggcctttagtgccctctgcagcctgtgctcttcgtccttgtgctgcccggcagccgatggcctttcctccaggctcggcacagtaggaagcgccaatgttcctgataatcaaatttatgggcgtgcgtgtgagagagagagagtgtgttcctgctgaagcatctcggttaaatcaaaacactctgtaattattgggttcttctttcctcttgccagaacactctctaattattggtttctttcctcctgctcttgacatttgatgtgtctatttgccctctctgtcaatagtgctgagtagaatactgcaggcacaagtcatgtttttgtaacgattttcgacagattagcattcctttaaaaaagaacttaagtcggttggggaagggggtccactcatattacaagggggatactttcaaaaatccttcaaataatggtaagagaagcagctttgcatagttgtgagggaacctggggcttactggagaagtgagcacacttctccaggcatgccatctgcagccttccttttctttctaggctgacctatggtcttctggtcactagtcattccatttggcagtagaatcaccttctcagttttgaaataggtgtaaccagtaggggaaaaggattgtggtgtgcgtggtgttctttgcgcacaaagatgaccgtggaatttttgaaggaggcaattattgtcattgtttaatatataactggaggcttaatttccaagtagctgttgtagcattaaatgtccctggctaggtgccagtagctatttccattgtacattgaatctattgcttctttttaaaatacaatggttcgtaggttgatttatctttattttaaagaaagggctaatatcacaaggtaagtttttgagcagatactatattacgaagtgttctgactcggatactggagaggaacagtggccctggatacctcctctgtgaaggtcaggttaagatctctttatgctcacagtataaagattaggtttggctgagagttacaggggagaggaaataacaattgtgtaactcaaattaaagtttgttcactcacattaagattccctagaagtagtcattccaaggctgtttagtgctccagcatagcaaggcctcgggctcctcctatgtttactttgctgtgcaaaggttctttttttttttttttttttaaatggttacctcattgtccaagatggctgctcaagctccagccattgcatatatgaggggacttcaaaaagttcatgcaaaaaaagaattaaaagataaaaataaaaaacaaacttctcagccaggcgcggtggctcacgcctgtagtaatgccagcactttgggaggccgaggcgggcagatcacgaagtcaggagatcgagaccatcctggctaacacagtgaaaccctgtctctactaaaaacagaaaaaattagccgggtgtggtgacaggcacctgtagtcccagctactttggaggctgaggcaggagaatggcgtgaacttgggaggtgaagctttcagtgagccgagatcgcgtcactgcactccagcctgggcgacagagcgagactctgtctcaaaaaacaaacaaacagacttctcaacataaggtctaacaagatcaagacacttttgtaaatgacgataccacccatttaatctgtccctaaagaacggagggttctaggagtttaactgtgtctatacagtctttttacattattttattttttgagacagaatctcattctgtcacccaggctggagtgcagtggtgcaatcttggctcactgcaacctccacctcccgggttcaagcgagtctcatgcctcagcctcccacgtagctgggattataggcgtgtgccaccacgcttggccaatttttatatttttagtagagatgcggtttcaccatgttggccagattggtgtcaaattcctgacctcaggtgattggcctccccaaagtgctgggattataggtgtgagccgccacgcccagccctctttttacattattaacagaaggaaaaatacgtttcctgtaaagattttttaaagattaggaaacaaacaagtcagaaggagccaaatcaggactgtaaggcagatttttaatgattgtttcccatgaaaactgtcacaaagttccccttgttggatgcttgttttggatgcgagcaatgagcaggagcactgttatcactgtggaggtggagggggctccctggtgacactttcctgggcatttttctgctcaagcttaggctttctcaaacactcgtaacaagcagctgtcatcgttgtttggcctccagaaagccaacaagcaaaatgccttgagcatctcaaagagcggttgccgtgaccttcgctgtcatccagattgctcttgctttgatggagccacttcttggtagccggcgctttgattgtggtttgtcttcaggatctgctgggaaagtcgtgtttcatttcctgtttcaattcttcaaagaaatccttcagggtcttgaccccatttgtttgagatttctgtctaaagctctgctctggtctgcagctcatctgagtgcagcattggcagccatcaaatggaaagtttgctcaactgtaattattcagtcagaattgtgtaagcgcgatggagaggtctgtgatactggctgttgtttgtgttgttaattgtcagtcctcttcacttagggcatgaactagatgaagtcttgccttgcaaattggtgtggttggtctgccactgagagtgtcatcatcttggccctccttaaaattaattgtccacttgaaaactactgatttctttggtgcattgcccccatcaactttttgtaaagcaccaatgatttcaccattctcccacccaaggttcattataaacttgatgtttgttcttgcttcaattttagcggaatttgtgttgctctgataagggctcctttcaaactaatatcttatccttcttactgtctcaaactagatcctgtttacacatgttatggaacaagttagtataagtttattttggggcaaaatgttttttgaagtacgtgcatagttttttttcttgaacatgaaaaccctttgtacatttcacctttccggaaagaagaagtagggaagaagaccccactgttttcctttaaggatgtttcttaaaagttacactcagcactttcacagggaggctggaaaatatctaggtgaccctgtgtgcaaatgaagaactggggattctagttatggaagggtggggtggatactggggaaaacgaacagcctctggcataggcgccatcctggctgatgctgagtttcttcttttctacctgagcttagctaaaatctcgccaccacgcccagaagagaatgcatttgctttggagttttctgtaatccttctgaattggttctaaattggtggccggcgcctgtagtcccagctacctgggaggctgaggcaggagaatggcatgaacctgggaggcgaagctttcagtgagccgagatagcgccactgcactccagcctgggcaacagagcaagactctgtctcaaaaaaaaaaaaaaaaaaaaaaaaaaaaaaaaaaaaaacaacttctcaacataaggtctaacaagatcaagacacttttgtaaatgacaataccacccatcttgggatatgatcaaatatacactaagaatatggaaatgaatcgtcctgacgtggaggtagaatactcaggtgaccagttgcttccaactaggactcagtcacccctggcttcagaagggcaggagacacgctgtgagaagctgtgagagtgttggagatttaggatgattctcagttcgcagattctttgttcagctatgtccagtctgttttgaagcctttccattttcattttaagttgttttttttcttacaaattctgtatagttatttatttctgatttggatgtctgaagtctttttgtatctgattcagctacagtttttgttggctgttcgtcatggtgcctgtttcctaatgtccttttaaattttgacagttattttcctttgaaattgaagtatgtgaaatctttgaagcttgggatgaagttggcttcttttaggactatgaagtttgcttctatcaagtgcttacaggtcctgacagtctgaggttttctatcacacccgggtcaaggccagccatccctcctctctgtttattactaggctgaggggcagaaacttttccttgcagtgccccggtggggtgggtttactttcgggtaaaccttgctctgcgtctgcagccctctgcacacccactcttctggagggatgccctccctcagacaccatgccagcacgggccttgggcgttgcctcctgcccctcaggccgcccatgactgcaacgccccactccagttcatgggctcaggcccgcggaacccggctgctctgctcaccgggctcgggcccgcagaacccggctgctctgctcaccgggctggccccagcttcactgctctcacaccagcacatccgtgaatttcagaacgtgcccctgcctgcttgtctgccccccacctccaagcattttcacttgttagtgagaggaacctggagcctgaatccaccacattgctggacattttgtgcttgtggtctttttattaccgcagatgtgatttccttgcttgtttcttcaagagcctactcttaagaggtatgatgaaatacttttgagagtgtgaatttcactaaatcacaaaatctgaaaggtgtacaagcagacaattctgaaagaaatagaaaatgtagctgagtgtctagtatcaagtgtagccatttctggtgataaattattatacgcattaggtggatagttttgtttactaagaattgaaggtaattctggaaattgataggtcagcaagcctttgcttagtgtgaggctaaggagtttgtcgtgtttatgcaaaatggtaatgtcctactgctgctttatcgatatggaaagttccagtaggttagaagtggttaagtaaagatgaatggcgaatgggatttgattaaatgtaaaagtttctgagggaagtgaatcactgtgtagatggagtcacccccggctattgatttaaatgacagttcagaaatagtatcaaaagaaacaaaatggccagcgtgtcaagaaaccagcagctcttctgttccggggtagccagcaccaggcatcagggcccccgggacctctggacatcagcgctgtgggtcgtcttggaattgacacttgagggcagatgaggcagcaccagctcctgggtgcctctgcacccagtgccctgtctccgcagtgagtgaggctggaccgggtgtgccagcatctggaggggtctgcagggtcggaatactgcatacagttggattttgaggtggagcattagctaattaactgcaaccaaaagtaaagtagcagggtggctgcttctccaggcctggaagcctgcgtggtggctgaactgcggtccccactgcagcagaaccgggcaggcctcagtggcctcaggctctgtccctgtgtatttcatggagaacagagtcagggaggtgcagggctcatcgctagccagggcacagcgggaccaggcatcctgatttgcagcctggtggcctttacctagtgccgcctcatctgacataaagtcacccgtgtgggggagagctgtattttaataatcagtttcaggtagatcccggaaacccaaacatatagaaaggtgagggacttcggttcccacctcctgagcaggtactgcctcgtgccagtggacctgggagggcgggaaggctgctctcaggggcacgctgttgcattatgccatgttgttcttttggttgtttattgtgatgagctcttattgtgataagaaaaataatcattttctcatctttagcagtgaatatacctcttttttaactgccatgttaacgtttgcctttgacagtgtgctctgagagacacaatctatgcttcaattctatgctcttcagctgtcataactcttctccatgtctttgaagtgcagtaaagaaagtgtaacccaaaaactgaacagtaattcctaaacttggcacttgctctccactctggagacattctaggtttcatttgagagggattttggcctgcttaaagcattttaacagcttttcgttggccccagtacaaagtctaaactctttacctgggaggaaaaattgcttttgatctggtccctgctctctaccacagcctcacctcccaccttccctcccaccagactccagcctcacctcccaccagactccagcctcacctcccaccttccctctcaccagactgcagcctgactgctgacatttcagtgtgttccaccttttcaggcgtttgctgggcagttttctcttcctcaacttgttaaattctattcatgcatcgagtcttgctgttgatgtcattttctttggaaactgttcctaaatccttaatcctttctaccttacaaaagaataacaaaataaaccccaagaaagatctactcctttattctttcacaggatatgattcctactccatcattgtcttcaactgtatggtgtgttgttgcgatgatcgtggtagcaggattgatatcagtattgctcactggtctctagtcttctagaaaataagggatggggacttccaggtagctgatgaaatggttgtgtcttaggttcctgtctccaaagtatttcctccagaataatgtagaagaacaagaaggagaaaagtaaactttgtaaaagccatgtcctcagtgtgaaagacacaatatactccaacttgaaaatcgtaaaaagaggtaacacccaatccaacatggaattcctgatgttctccatctccccactaccacaaggctctgtccaccttgggttgtaggtagttgacagaaaattataggtacaagtttgcagcagaaaaagacaaaaaggaaggagaaggaccttttgacatatgggtggatggcgaaaggaagaagaatcagcaggggaaatttagtgtcctgtagacagggacaaccacaggttgggtgtggtggctcatgcctataatcccagcagtttgggaggctgaggcaggcagatggcttgagcccaggagttcgagaccagcctgggcaacatggcaaaaccctttctctacaaaaaacaaacaaatagtattgtacaaatgagtttctggtctcgttaattatactattgttatgtaagacctaatggtcgggcatgttgggttaaggccatgtgtactagctttgcaacattgctgaatatctaaaattatttcaagataaaaattaagaaaggaaagcagtggttatgcctgtttatacttgagccagagcaacgcctgactcagaatagacagtcacccattcacgttttctaacttcagattgtgcagttgtttgttggttcttgggtttttaaataatgcatgaagaaggtggaaggagcggcgccctgggattgcagtatcgtggtgttgagtcacttgcgatctttccggttcagtgactcctcagtgtgcgtggattggggccctccagagatgctctctgtctgtgtgtgtcatcgcagccctctgctgtccatgcccgacaagccagtggctttcactgctgtgtggggtgggggcgatgtttgtgtttgttttattccaacagtggcttcgtttctcttccagggcatttctctcgctcttcacaagaagtggcctctgcttcttctgattattcacactgtccattattgattactccttatcccctttctttcctctgcatgaaaggcaggtctctgccgggcgcagcggctacctgtaatcccagctactcgggaggctgaggcaggagaattgcctgaactcgggaggcggaagttgcagagaatggcctgaaccccagaggtggaggttgcagtgagccgagattgtgccactgcactccagcctgggtgacagagtgagactcccatctccaaaaacaaaaaaagaaaggcaggtcttttgtgaattgacggctaggctcacttcctggagggcagtcggctggctcaggcacagggcgggaggaaagaggcttccgcacagccacgttctcctcattcctcacctcgtagaaaagatttttggggggtggtggttaatcatgttactctaagttttcgtttcctttttactcggctcaggaatagtaagatgcctttacaggcccgtttgaatgcatttaaacttaagaatttctgtcatttttccctccctttttgtttctcttagcttattttttgagcctgcaaactttaaatttttattattctgagaatagcttatttactaacttaaatcctgttttgaaaaaggcaggttgtgaaaaagtaaaccataaatagtttatagctgtaaggagttgaagtgtcttcagaattaatatttatgtatttatttgaagctcagtttagctgttgtcattcaaagttctgcctcaagtatgcccagatcttgtcagttacacagccttcctttctctgctttctcttcttcccaattcttccagcatctcaagaggcagggttaacaattccactcccaggctgggtgaggtgtcctctccacggttccccagagcccagagaggcggagggagccccatggtccctgtcctggagaggaagacctcccccagagtccagagagagggatggagcccccatggtccctgtcctggagaggaacctccagttctcggtcagggccaagacccccaagtgggtcacagttacttgtttttcctcttgccctcctcagcctgctggctcttctgtgcaggacctcagactgccaggctcctgctctcttcctccaggcacatcttctcaccagaactccagccctgcacctcagactccctgttcattgtctcacctcagccccatctcaagtctagaaccccctttctttcttgttgacttattccgttctaactggaatcctagaagagaatgacaggatgatggtgctgtgcctctgaagggggtttgttaaaatactcagaatcagcagggcacggtggctcaagcctgtaatcccagcactttgggaggcccaggtaggtggatcatgaggccaggagttcaagaccagcctggccaagatggtgaaatcccatctttactaaaaatacaaaattagctgggcgcagtggcaggtgcctgtaattccagctactcaggagaggcaggagaatcgcttgaacccaggtggcagaggttgcagtgagccaagattgagccactgcacttcagcctgggcaacagagtgagactctgtctcaaaaaacaaacaaacagacaaaaactcagaaccatgcctagaaaatactcagggctccctgtttgttagataaattgttagatcagccaatgagtgacatattgcatcttgtatgctgcatcccaggggatttagttagtgacagaggagaaatacagctcctttgcaagtggtcctgcgtgccgaggcaaagatccgcgtataaaatcccacgtcgcacgtatgtgctgggctcgtctgtgaacaggttacatggaccctctctagacccagcagatgggctttgaaatgtggccttcgtgttcagctggcatttggttttcaccaggagacaacagcaaacacacaggcggaagaggagagggagcccgtgaggctcattgtcaatacaggggagacagccactcaggacggggcttcaaggcatgcatgggtttgacagaggtgaggggcctggcgcactggagtccaggctcatggagggaggggttggtttggcatcttctctttagcacctgccacgtgttctgcggaggccagttagtgtcagtcagcaaaacaccacctccaaatgctggcagtggagtgtctcgctttatttttttattcagatcgataactcctaggaaaagagcatcttttagagtcacctgaaactaaataaagagcagagtgcctgagttgtggaaacactggtgctgtctgggcctcatggcagaaagttgcggggccgcggctctcgttccgtcctcacactgccctgctagagtgcgtgcgtgctgtgtgcattcctcatgccgctgctgtccctggcaggtgacagttcaggggcacctcgcgctgtgggtgagttctcgagtgctgcggggagtgtagggaaggccggtggtgcggtatcgaggaccaattctgtgtgtgtggttcaacatttctagttctcttacaccttcatgaggtgtacgtctcttacaccttcatgaggtgtacgtctcttacaccttcatgaggtgtacgtctcttacaccttcatgaggtgtacgtctcttacagcttcatgaggtgtacgtctcttacaccttcatgaggtgtacgtctcttacaccttcatgaggtgtacgtctcttacaccttcatgaggtgtacgtctcttacaccttcatgaggtgtacgtctcttacaccttcttgaggttgaatttcatttgattcttaaatatttggctgaaaaattagataataaacgtagttacaatctctcctgtcatgaacactgaggaagaatgaatttgtctaaatattctctcggtgtattagaatattggtaaatgatgtggaatcttcctgtatttgatgtgatataatcttatcagttctttaaaatgatgtagcaggctgaccgttggccccccaaaagattagccacatcatattttctggaacctgtgaatattacctcatgtggtgaaagatgtgattaggtccccccccccaccccaaacaaagtctcgctctgtcatccaggctggagtacagtggtgcaatcatgggtcgctgcagcctcgacctcttgggctcaagccatcctcccacctcagcctcccaagtatctagaactacagacctgcgccaccacacccagctaattgttaaatttttttgtaaagtcaggggtctccctatgtaactcaggctggtcttgaactcctggactcaagccatttgcctgcctcagccccaaagtgctggattacaggtgtgagccactgcacccagccaggttaaggttgttgagagggagagcttatcttggattatttgagtgagccctagatgtaatcacgggtgtccttatgagtgagaagcagaggagctttgagtcagacagaagagaaggccatgtgaagactgaggcagagctgggagtgatgtggccacaggccaaggaacaccgaggcgtgcccacggccaccagaaactggaagaggccggaatggatttgccccagggcctccagagggagcgtggccctgctgacttagtgattttgcatgaatacttgagtctatagagtttgagaacaaggactttctcttacataaccacagtacatttatcaaaattaggaaatataacattgattcagtcctgtgttctaatttgtttcctttttttttcttaaaaaaaagaaaaatagcgtcttgctgtgttccccaggctggagtgcagtggtgtgatccatcatagctcactgcagccttgaactcctgggctcaagtgattctcctgcctcagcctcctgagtagctgggaccacaggcacgtaccactacacccagctaatttatttattttttgtagagatggggtttcaacatgttgtccaggccggtcttgagctcctgggaaccaagccatcctcctgccttggcctcctagactgctgggattacaggcgcgagccaagcgctcagctgatcgaattcatttcttagccagttgtttcagctccgtctgtggcagcctccgcactggcctgggagcggaccccggactacacacggctttttgatggcacttcatcctcctcagctttgctttctcagtctggccatttttgaaggatgcgggccagttcagttctaatcctcagtttgcgttttcctcctgtcttctcccgacaagagcagggcaagcatctgtggcaggagggctgcagaagtgatactggggcttcctcaggtgctgtcggaggtgctgatggcattttgtcccatgattggccatactcattttgaccttgattaagatggcgtccccacatttctccgctgcggagttgttttccctttgtaagtaataaggactctggctctgtgcctaccctgttccttgtgctggttttgcaaccatggataattcttgcccacatcagttatgatcgtgatggttgccaaatgctggttttctgattgtatgtttttcttcccttcgcccccattcattccttcattcattcctttatatcattctaaaataaattcttattttatcccatcaatcatctgctactgtcattgtttattttgatgctccagttgtccctgatttcgctgccaccctccaagctcactcctgtccatgtgttttatgtgttctcttcactgttgagcaattccttgctttcaggcacgacaaggtggagcagcctcatattctacccgcatggctcaagtcctggcatcagccacgtttccaaggagccctggttccttttctacagaatgggacttagaagccaagatgtcggctcctggcattgactccctcatcctcaacatgccgctcagttgcctggtgccacaatacacaggaagtaaattcagaattgccgtctcgtaccatcgtaaacaaactttctcacgtgaattcactatctgttcccagttattttctgcctgtggactgaggggtggagtcaggtgtagatgccatggtcagagttacttgggtgggctttgtcccctctgttccgggctgttatttgcactgtactcaagttcacgtgtttagtttgtattctgttccgttgcagggctctcttatccttgcttatttcttcttttatgagtatgtaagttattaatgtggttctgcaagtcaaaactgtataaagctagagtcatgtcatctccccaatcctgtttccaggctgccttgtgtttcattactttcaggcatatcttgtctttcttttttttttaaataaggagatacatgtttatttatttatttatttatttatttatttatttatttatttatttaatttttctggaggcatagtctcgctctgccgcccaggctggagttgcagtggtgtgatctcggctcactgcaagctcctcctcccgggttcacgccattctcctgcctcagcctcccgagtagctgggactacagacgcccaccaccacacccggctaattttttgtattttttagtagagatggggtttcaccgtgttagccaggatggtctcgatctcctgacctcgtgatccacccacctcggcctcccatagtgctgggattacaggcgtgagccactgcgcccagccatgttattttcttatatcctgctcttacatggcaagatagtatactaggtatgctcctctgcactctgctttttgccactacacagcgtgtcctggaaatcactccatgtcagtttctagggactttctcttccttttttgagagctgtatggcacttcattacgtgagtcaacatcttaacattgtaacattttgcaattacagataataccgcattgtataaccttgttcagatgtattttgtattaaggctgtatcttcaaggtaaatttatagtatcactgggtggaaaaatgtgtatgtagtttttttctagttattgtcaaattcccttcctacctcaggattgtatacccttttccattcccctcggcaacataggagagcgcctcattcggagtcgcccctcattcagggtcgcacctcattcggagtcacccctcattcagggtcgcttgttgcgttttcagtgtatgccagtgtgtgcagtctgggagatgagaaatgctctcggtgtagttttaatttgaattatttttattgtaagtgagttgaggtattgctctgtctcccaggctggagtgcagtggtgtgatcttggctcactacagcctcgacctcctgggttcaagtgaccctcccacctcagcctcctgagtagctgggactacggccgtgtaccaccatgcccagctaattaaaacatttttttttttaatgtaggaatagagtcttgatatgttaacttgaactcctggggtcaagtgatcctccatccttggcctcccaaagtgctgggattacaggtatgacccactgtgcctggctaatatttttgtatattcagggccatttccatatatatatatatatatatatatattttttttttttttttttttttttttttttgctgtgaattatctgacatgtcttttgccatttgcctcatggaatgatttatatttccacgacttttaattcctagtgacagctgctactccccacatcgtggggtgcttcctttgagcttcttcccagctgcctctggctgttgaactccctctagtcgtaagcgtaagatggacccccagagtcgtcctgggagcagcactcggaaatgcccgacaagaaccctatttctcctcatcaggtgggggcactttccagtcctcagagctcttctgacagtgttggtggcctctgcagagggcagggtcatcctgtgcctggagggacataagcatggttagaggctttctagaagggattcaggcctccgacccatctggtgctgttcatttttgagattacgtgtctctaagataaaggattgggaggatgggccatggtttatagagcactggtcactgagtcttcctgtgcccagatgtggggctcagcacttgctatgcataaactcacctgagcttcataacaactttttttttttttttttgagacagagtctcgctctgtcgcccatgctggagtgcggtggcacgatctcggctcactgcaagctccgcctcctgggttcacgccattctcctgcctcagcctcctgagtagctgggactacaggcgcccgccaccacgcctggctaatttttttatttttagtagagacggggtttcaccgtgttagccaggatgcataacacctcctttgaagtagacgcaaccattgttcccagttcacagattagaaaactgagacttaagtgcgtcactgtctagtgcagttctaccctcacgacaaagccatgtttcttccccgtgaatgaagagaaaggtaaatttacagtatttgcctttcgggactcattggtattctctcttgaaacacttcttactgcataattcagagttctcggcagcgtatccatctcttagaaagggctcttcctgggaaggctggaaagaaaggctctcttctaacgaggccggtgtctcaagcactccactaaatatgaagaggtacttgcttgatttttacaaaatcagctttgtgagaggatgagtggtccagcccctcgcccagctgtgtgagtcctgagcacctgcgcttcagagtaaggctgttggacctgggacccttccatgaaatttattttcaatcttgaatgagatttactttaatgggaggccttaaaagcagatgccatgcgagttaaaatcacacagcttattgcatctatcagttccagtcagagctgatggcaaactcttgttctttcagttcagtaaccagagagtggaatctgtctgtctgtgtcttccataaccaaaatacatcaccccacgcaatgcctcctaataactggggctttgtggtcagggtttttgcagggcaggccccttttctgcaggcaaagtgctaatggccagcgcctacactgcaggcctctggcgcattctctgccgagagttctgtccgtcccacttctcctcactgtctagtcttcttctgaccctcccagcctggttcacgtttgctcttcgttaccctcttcctgtttctttctcctgtctctcctcccaccacaccatccctcacatgcaccatggggtgctccttcagattgtcatctgatcgagccacagtcccactcagcccatgtttgtcaggactctgccactggtcacttgtccacaaggaaccactgtctttgagcttcttcctccggtgctcttagcatctgcccacactgtatctatctgtgtccaggtcttgttttctgtgtcattgtttgatgaaaggcagggactcattcggtgagtgggtctcccctgcctctgccccacaccagcacactgctctgcccttggtgggcacccgttggtgtgtgttgagctgggtgttgtacctcggtgtctgcgtggagaaatgcgaacagtgagtgccacagcacagccacggaatggttgtcatcggcttcagaaggggaatgaaaggggcagcaccgtgggtgttgatgatctccgaggctgcctgtttagagcgtcccttccctgagatggaggcgtagcttcaccgtgtagtgtttaagctttaaaacgtgaaatgcagtgaggccgacagtgagttgtaggaagctcagaaatgggatgcccgcactgccttcaattcaccctccattgtccatcgccgctggcatacccaggtcagcgcctgcaggcccctgtctcaaaagatgtggccggcttcttgtcccggtactgcctgaagcttcacctcagcaccgctagcttcacactggccacacccacctccactcagcagtctccatgctgtagcccaaagcatgtagtggcggttgagtacctgagtgggggaaataattaactgggatgcttttattgataagtagtcagatgcctgttaagtgacatttatgaacactcacgtagcactgctgcctgttagccaggcactagtcaaaggacttttgatgtattagctcatttaatcttcacagaaactagaagttagacactatcctctccactcccttcacccccagccccaaacacacacaattttatagccgaagaaacggaggcacaaagaaggtgaagactttgctaaagtcacaaaactggtataagcatgggctttgtgtgtgtccaaagttcatccctcaaccgtttctctctggatcaataattaaaaggtttatcaagaagtctgaaggtaaatggttcagtattgtcaggttctggataagtttctctgtgttcttgacttttccctcatgatgacaagaaggctgccaccactccaaacatcacagcctcacagttgtgctcaaagggagaaagaagaagggacggccgttctcctttgagcacactgtttcactggcttcctgtgggttccactggcctgacttgatgcctgggacactttaagcatctccggtgctatgcgggctgggaagaagtgagctgtagaggcagccagtgttactctctgctccatcccttttttgttaattttgcggttactgttatttaaactagatgtatctctagggcagtggcaggaatcgactccaaggacactgaccagcttggggctgctgcctggcccaggccggcgcatgttggaacacagactctctgcccttccaccccaagcctggtgggcgagtgagtctgcccagagggagtgcctttttctgctttacacaaggcacctcaaggggtagaggtggcctctcctgcagaacggcagctgccctgttgccgttctgataaattgcaagataaaactgaagtgcaaggaaggggcatttttgattttggatatgactttgcctaaaaatggcaccttaaggtgttttaaacatttatcaaacggtttcatatgtatggagtatgtctgtgcagcattcttaaagtgacaggactaccttatgaagtcagtaaatcctttcatctccccagacagccagaagctagtcagcagatgaacacattcacttgtatgttccccttggcaacattattcctagagaggttgcatctgcatcttggagtccgcatgataaatcatttatgtactcacagaaaccatgcactcccccgtgggaagagttctaggtgtagcaggggcggaggacgccacctgctccctgacatccgtctttccgaagccatcgctggagccctctgctgagtgtgggcagtgaggcctcgtcttacgcatgtggtcagaggagataatgtggctagaagtgctttgtaagcgccaaggattgctgttatgaggaatttactagatttcaggctttcatcagatagttagcgaggaagcgcaaaagcacagcatggtctccatgtttgctgacctgcagcgaaaagtcagaaagctaattggaggccattcataggctgattctaccttacaccatcattatactttttgtctataagactggagaagatctttctgagacatatcactatcagtgttttacgcgtatgaaacatatttttctttccttctttatgttcatttttaaaatttttgatcagtgccctcaagcattctcctattcaatagaaaacatatttttctaggtatgataatctttcagatttttggtatgtgtacctttgctaaaaacacatttaatatttctacctgtctggacaccttttaaaaatgtctggctgcaccttggagaaacgcttcatgcaagcagattctaattaaagtaggaaactttactttaccattaagttatatgtaaaagcattctaggggagagtcttttaatcattgaaacattttcaaacgtgtttgctcatttgcttctttatttgtttttatggcttattcatttgtttatttttaaactttttattatgaaaaatttcaacatatacccatcatctatcttcagtcattttcagctgccagttccagtctcctttcatctgtgcccccacccagtccccccttcccactcccctggctgattaggaagcaaatcccagacttcatgtaatttcacctgtcaatatttctgaaagaaatatttactttctctaaagataagtatgcttctaaacacacacacacacatacacacacacacaatgtttgtttgaatcaggatgcaagtgagatgaatgtattgtgagttacttcatctattctgttaatccatgtaattaatccaaaagtcagtccctcaccccagcactctctgtgcacctgtctgcctgtctctttctgcagttgattggttgaagaaactggatcatgtagcctgtagaatttatcgtggtctcgatctcgtcagtggcttctccccccttgccctgggtgagccacactcacctctgctccttggatttcctctcggtggtggacacagccgggctcccctagattctggttcagtcagggaatgtttcatgtgtggtgctgtgtccttactttaggatatctgatagtccctctgtgatattagcagctattgatgatcattgtctggatctatttattagagattatgaaaagatggtgttattgtttcattcctttttttgcaacaggggatctcacttggccacccaggctggagtgcagtggcgcaaacatggctcactggagcctcaaattctcgggcccaagtgatcctcccacctgagacttccaagtagctgggaccacaggcacatgacactatgccttgctaatttttaaatgtcttgtagaaacagggttttgctatgttgcccagactggtttttaattcctggcctcaagcaatcttcctgcctcagcttcccaaagtgctggggttacagatacgagccactgtgcttagctgtccttatttgttaactggagtatctctatataaagaaaccctctcatcaattatttggatagctcaaggtacagtcatagaggaaagccagcatcaatacttactttcctttattaaccagttttcaaaatcgtgtgtgggcttctctcaaaggtgactagtaaggggtgtgtgggtgtgatatgtgtgtgtgcatgtcgtgtgtgtgtgcatgcacgtgtgtgcatgcataggtatgtgtgtggtgtggtgtgtgtggccaccctgttgaaggcactacctactgtattcgtttctcactgcatctctcaaaggtgactagtgtgggggtgtgtgtggatgtgagtgatgtgtgtgtgtgcacgcatgtcagtgtgtgcgcataggtgtgtgtggtgtggcgtgtgtggccaccctattgaatgcatgacttactctattcgttcttcaccgatgtccacgtcgttccatctttgtgttggcccctgagccttgtgatgcagttctcgcggtcctcaattgcttcattttgatatggtatgacaagccagcatgttctgtgccattttgtacttcttctaccctaggcctgaaatcagccacgtgtctgtctccagggagtcttggtttccttccatgggaagtggtatggagagcttaatctgggctccagggctgctcattgacccttgttcagccccctttctctatgggtgtttcaaagataaaatacgaaggcgctcttacacatccaggttcaggtctgcaaggtctgcttactctcatgggtcctacagctgtatctgcttctttccacatggagtgctcagattgttcatgaacaccaacgtaattacccattctcttatcctgcaccacacctggcagtttcagaaagcaacaccagcactgccactgacgcggttactgagagccgctgccgaggcatagccgctgctgaggcactcgcccttccttctcaggttaggcacagatgtcgagtgacattaccctgtatttttatttatttatttttgagacaggctctcactgtggcccaggctggagtacagtagcagaatcatagttcactgcagcctcaacctcctgggctcaagccatcctcccacctcagcctctcaagtagccaagactataggtgcacgccaccatgtctggctacgttatgttatgttatgttatgttatgttatgttatgttatgttatgttatgttatttttttgagatggagtcttactctgttatccaggctggagcgcagtggcatgatctcggctcaccgcaacctccacctcccaggttcaagcgattctcctgcctcagcctcccaagtagctgggattacaggcacatgccaccatgcccagctaattttgtattttcagtagagatggggtttctccatgttggtcaggctggtcttgaactcctgacctcaggtgatccacctgccttggcctcccaaagtgctaggattacaggcgtgagccaccgtgcctggcctaatttatttatttatatttttagtagtgatgaagtcttcctatgttgcccaggctggtcttgaactcctggcctcaagtgatcctcctgcctcagcctcccaaagtgttaggattataggcatgagccactgtgcctggctggattactttttaaaaaaattaattttgctttgtagttatgtaaaatatttcatgagtccaaagttaaatacacaaaatgaagtttattgaaaggagcctggctgctcttcctgtcctggtgagcctattttatcttttcttctgtaggtcaccactgaaatgttttaataatatgtgtaccacatgtgatgacacgtatgcgtaaccttgggtacatttatatacgcacacacgcacacagtgttttctctttagggaagtgctgtatgttgtacatggtttcttctaccttgcttcttgttgctgtattagactggaatccacgtgtcctcattggaatcaaagcttcattgtttcctctaaagcagagtttctccagcttggcccgattggcatttggatcagctaattcatgattgtggtggtcgtgtgctcatgtgctgtgcggacagtcacaggatgtgtagcaggtccccaggccattgccatcagatgccagcagggcccacttctcccagcagtgccgaccgagcctgtctgcagacaacaccagtgcccccgagggcagagttgctcccagcggagatggtgtttctcgggttcattggggggattctgagcacccatttcagaagtggatttggccccatctggaagcaatagcttttctttttggactttgaataataaaccagctattctagttcttgtctgcctcttctgcaaattaaggaaggaaggaagaattgttactgaataatacataaaggaaagagtcgatgattttacaaatttcacgtaactctgcccttactgggcagacacgtgttgagaacattacgagttactgtgaccttgtagtccctttgggttcggtgtacgcaatttcctactctcagcatctgccagcccagactctggcagacttatgccagccctgggtgctgtagggtcagccacccccttccacgcagggtgggcgtccagatggtgctgtgggaaacagcgttttgccaggggccagagagctgactcagatagtgacctggaaaacagactgtggatcaggtgggcacgggcctggaacagggtccctgaaacacccagcaagaggctggggaatgtctggagagcccggcatggtccggagcgtccacgcagccagcagctcacatcctcttgctcctggcggccgatgctctgcgcagaaacgggcttggtctgaacggagagggacattgtgaacttgaaatgaaatctgacaagaaattagaaatttcttcagaaagtaaagagcgctgtcaagaatgcgagctgaagatttgcgtttacagctgtagagcaaatacaggcggctctgacatctcagcttttgtttgccactgctgcagcctcaggtgcctcatctggggcttcattcagagtgggtggggaggcgacaggtcgaggcagttgccccgtgctcacgaatccctgacacagctggtgacctctccaggtgacctcttcaagcctggtcccaggggcaggcatgcccgggcatggccctcgcagatggctttgctggcctggtctggcaaccgttgaataaatactgatttcccacccaggtgaggcgcatggtagatgtttgttctgtgcattgcgttggtcggcctccacagtcgcacaatctctcagtggagtgagagtgtcttccatatgtggggccgtggtgctgaaggcttgtgcgttgagtgcctcctttcccgtgaatgtgttggttctggtgaccagggtggagcctccctgcgccccttccttccatccagcatcaggttcccagttctctgcctgccaggcaggcgtgcacatatggagtgtctgggaacctgcagctgttgatcacggctggtggtagctccgcacttaagtaaggaggagtgattttcccgaggagatgtggtattggtcggagttgctgggaaatcagcagcactgagtgatcaggttgtcgtgagctcctgcctccatccaccccattctggcggttcctggcttcactgcctcttgaagacagcctctctggcactcatgggcatgttggccttctcgaggggaaggggttgagtaactcatggcctgttagtgtgtgccagagactcagcaccacgggcagacacagtgccacgggcagctatatccaaggagggtgagggtgctccccagaagcctctgggcctccgtgggtgtcatcagggtagtgagcaggaagcctgggggctgagctgggctgcctggctttgacatgggcctgtgcggggctggctgtgtggccccgtgagggttactgaacctctctgtgcccagcctcctgtttgtgaggcaggagcgatggcagtgcccactgcatggtggtaagagtgaggcgggtagaatgcatgtgcccaagacagaggctgccccgacccgtgctgtgcgggtcactcacccccacattgtctgccacgggggcccgagcatttccacacgagactttcacatcagccacccgggcagggcccgcgttagtttagttgtttgtggaggagaaaattgaggtttggttttgttcatgacgttgccaggtcgaatggctggtgaatcattgatttggggctgagacttaagtttcccatctctgggcgggacctgtgctctctccctgtaacagtggcctctgttacagaggggcaggtgggtggctcacgtgtgggctcacctgcgtcacttctctccagctcacctccactgcgagagtgcctggggatgcctgccagccacccagagccagcgtcttcccaagcagctgttttacaggaaacaaagcaggatgaccttgggcttcctagtctctgcacgttaccccgaattccagaataatcgtgagaaggagccagtggagtggtgtgacttttgtatttatagacttcttccaaaggtcacctcttttatttctgaaaaacaagtcgcttgaggcccatctttacagagtgacaggagctcaggatgcagaggcaccaaggccagggaggagcgttgggggtggctggagctggtgggccaagggccgcagaccacttttgccctgcatggcctcgtggctgccttttctacctgcgtgagctggctttgatctaccccggacccatctttctgtgaagagtttgcagaggatgctggttacatcttagatggaaattggccgtgtctctgctgtttctgagtgtgcgactctcagagccaaggtggcatctggcgactggccttgttcttgtgagtccctgtagggcaggatagatttttccggcagggctgcagcctggagttcaggcttcctctcccttttaaatttcaaagactcagggttccatttaaacagacaagataagtggcagctttgttttgttttgttttttcattaagagattttggagggggaggaaaccagccttacagtgatagcatcaggaaaagattacacagaatggcatcttattatgaaatattgaaaacatttaaagagcaaataaaatatgcaaatagagtgggacagaatttgtactgcacagcctcttgccctacatctttcccaataaaaatttaactctgaggtccatgttgggacaaaaaaaatgatactgggatagtggagctcggctttcgttagttcaaagcgagcagcatattaatccaagtaagcagaattcccatgtagattcattccacagccttttcttgggtgacgactctgtgcccagaagcaaggggctgactgggacctgagaggcctcttcttagtggccatggcctcccggggcaaggccggctggtgcgtcagagcctggatctctgcagtgggcgcagaagggacacaggaattttctcttggcctctttgctggacttgcagcagggatgccgccgaactcagccgtttgcaggcgggagcacgtgagtgagcgagtgtgggatccagccagcccccccaagcaccaatacaggagcaaactccatgcggggcccacagccagaccaggtgtgtcaccttgaggggaacacggtggcacccaggcaagggtgcccatgaccctgaagccccagagtgggtgttagtgtgctcattagctcttttagttcttccatccacagtccaacagatggtggcatgttagcagctccgtcgccccctggccccatcacgtagggtggctgccctctgccagcaggagcaaagggctagtgtgacagtctttctggtaccagcacttggtgggtcctgagctcttgtccagcatccaagcagaatgcagatgtgcctacagtcagagagtgagcaaggtgaggggttttactgagtgatgaaagagctttctgcagagaggggacatgggggcggtccccccacccgaaggtgggaaaatccctccagtgtgtcttagtctggggcttttgtgggctcagaataggggaggggcaggctgtaggtagtattggaaaaggcaacatttgattggttaaaaggcattattcagaaagaatcaattgggaaagggtgggcaaacgggaataggagttttgctctgggtcttgggttttatccaggacctgccgtctggtctttcagccttcaggctgttatttggcttggaggtaggtttcaccagggacctgcccctgtctgcctaggcatttgactacctcccatcggtatcagaagcaccttgtgagccccagggagctggtgaggaccttgtaagggaggaggagggcggcgtgataggtgcaggtggcggcgtgataggtgcaggtggcaccgtgcacagccacgtcagggacttgggaacgtctgggccaaggagccaccttgtgcagaggcatggagtcatgagagattagccacggtgggaacgtggtgaggacactgggctgagcagagggctcgcaggtggtgctgggcagggagcctgttgacccacccacagagggtttgtctcaggggccggtggcctgactgctgtgcgttaaggaggaaggctctgacagaatggggggacttggagaggggtcattttggaggcctgaaggtggttggggtgtttgactcccatgaaggcagaggtggtacagcgaagtcagagggacacattcctgtgacccactgggcaccagggagatggcaggagcaggagctgagggtagtggtgaggtttctgctggcagagtttggtggttgagtttctgctggctgatttggtggggccagcgagtagacaaggatcccagacgggtgggtgcggggcaaggtggggaatttgaccagatttctcttgaaggtgccctatggggaaacggtgttgtgaaagtaggagggtgaggaacggaggcgactgagggtccacagaggaggatgggccagaggcagaggtgacaggccaggtaggccgagtgagcaggggagccacgtgaggccagtgcgggcgcaccaggcactgggccccatgcagaggggctgccgccccacccccacccaggcctcactgactcctgtgggagccatctaggtacagcaaccacgtggaggatagcgtgaaaagtgacgggacggagcaaagaaagacaccagctcctcgtttgcagaggtttctgcaccgttgtcaccagcatgtggtcatggcctgctccccgggggccattccagccattgatccacattgtcctccagccaaaggaaacaaagcgggaagtggaaagagctggagttacgtgggggcaccttccatcctaggccggcagctggtcaacctcctcagcctcgtcaccgtttaacatcctcccttttgttcttttctccttaatctttatgtttggaaagatttctatagacaaatgtgccgctgcttctccatagccttatctggaacaaaggaaatgtcttttattaccattcatgcaggtataatccgtgaaagacaagcctgttctgccagtcaccaagtcagtccttttccttctgtcttgctcatggaaggctgtcccggccctcacctgactagtggtgcagctcttcagggggtagtgcccatccaattcctggggaaacccaggcgagcctgctggccaggaagcgccagcttgtgtctgattgctaggttaccctgggtgcttcctggatgttcaggcgcccgtgattcccccagcatctgcctcgagcttatgtgcatggagcagcagatccctttgtctgggcagttagattgtctgctaaggaaagtgggtgttggagcaaaagccttgcttcactgctgtactccaacccatcaaaatggaattgtttaaaatgccctcaaaataaaaatagagaccccaagctcttgataaaacagctttctctggagaagctcatcgggctgtgtaaactccaataggaagtatttattcatcatttgtatgtgcacaaatatttatttaatgtcaactgtgaaggctgatgagtaaatcagcaggtagagtccagtaccctggtgcagtgatggggagctagaggtgctgtgcacagtaccctggtgcagtgatggggagctagaggtgctatgcacagtaccctggtgcagtgatggggagctagaggtgctatgcacagtgccctggtgcagtgatggggagcaagaggtgctatgcacggtaccctggtgcagtgatggggagctagaggtgctgtgcacggtaccctggtgcagtgatggggagctagaggtgctgtgcacggtgccctggtgcagtgatggggagctagaggtgctgtgcacagtaccctggtgcagtgatggggagctagaggtgctgtgcacggtaccctggtgcagtgatggggagctagaggtgctgtgcacggtgccctggtgcagtgatggggagctagaggtgctgtgcacggtgccctggtgcagtgatggggagctagaggtgctgtgcacggtgccctggtgcagtgatggggagcaagaggtgctgtgcacggtaccctggtgcagtgatggggagctagaggtgctgtgcacggtaccctggtacagtgatggggagctagaggtgctacgcacagtaccctggtgcagtgatggggagctagaggtgctatgcagcctttggcatggcttcctatccagtgtctggaagagcatccaagaaggatgctttcaacatgataaaagacaagggacatttaacatgatacttgaagaatgaatagaaaatgaccaggcaagacttggaataggacatggagaaaaggtaggaagaaggttctgggcagaaggctggaaagtaggttagaacataatgaggcaaaaggcttaaaagatcctttcttgtggctgaagtgtagactctcagagattatgtctagtgatcaggctggagatcttgcagggactcgtaggtctttctaaagagttttcaaagttagtgggaagacatcaaaggtttctaagcgggagaaggacctattgagttttggagaatggatttggagtgaaacaaggctggaggataagttgggaagttactccaatgatctaagaaatagataagtggtggtggtgatggtggtagtggtggtgatggtggtggtggtgatggtgatggtggtggttatgatggtggtggtggtgatggtggtggtggtggtggtggtgatgatggtggtggtgatggtagagatgatggtgatggtgatggtggtggtggtggtggtgatgatgatggtggtggtgatggtagagatgatggtgatggtgatgatggaagtggtggtgatggtgatgatggtgatggtggtggtggtggcggcgatgatggtggtggtgatggtagagatgatggtgatggtgatgatggaggtggtggtgatggtgatggtggtggtgatggtggtggtggtggtggtgatgatggtggtggtggtggtggtgatgatggtgatggtgatggtagagatgatgatggtggtggtggtgatgatgatggtggtgatggtgatggtggtggtggtggtgatggtagagatgatggtggtggtagtggtggtttggtagtggcttgacctgggtattgatagcacggatagaaagaggtggatggactcagtcaggattgaagaggtagactcaacaggatgcaatgattgatgacataaaaatggaaagggtgaaagacaagaaggtgtcaagggtgattcttgggtttctgttgtccagctgggtgattctcaggtttctgttgtccaaatggttagtgaccccatccatatggattgaggagagaggggagcaagcttaggagggaagacacagaagatgtgcactggacaattcctctctgctgaaaggcctcagacacactgatggattgcttcacatctgggaacaaatgctgtgaagtctctgtgtcctcagcggctccacctggttgcactagggtggaatcatgggaaagggcacaggttatatattcttgccatttattctcacggagaccataatgctcattccatatcaaccgaaaggtagcatttgccatcactctttttggcttttgttttgtttctctgtattttacttgtttttcatcctaacacccttaagggtgagggtaaacaagggctataggaggcgaggccttccagggaaatgccgggcagggaagaaggtcaggtccgcctaaaggtccctcctaccaacatttccctggaaatctttgcatcctacttgagaaggagaggggtagggtgaaactttcactagaccccagatggggccagaactggcctgagtcctgaaatgacatttgttcctccaggacagttctgagagtgttgcaggcatttcggtttgttggatctaaacttgacctgctattcattgctataggatgggaggatggcagcgatatcacttgtactcacagacccagcctagtacgacgccagtgtctttgttagaaactctacagatgtctatgtccagcctgccccagcggcacagggctacccctggtgggattttgtcaaaggggaagacccaccaagtagagcccctgagcccctcctcttcccaggtggccgtctctccttgatccacaccagcggcagtttgtgcagcttcaccagagcttctagcgggaccatgccgccacgagggccactgggagcagagtccctcccatgctcagggctctccagggtctgaagtctgcacttgtatgagaaggagctccaataccaataaaagtctacgtggaaaatgcagaatctgattgcagtagcatttcttaggccttattagcatataaatttaccaggtgtcattttaggacaagagcccgtcactgagaaggaaatgaaatttggagctgcattttccttcattaaaccaagggcccatttttgttttgttttgttttttgttttgttttcttttcttcggttattcattcttttattatcttctgctgtcacatcctccaaaactcctgtgcatatattttcttgcaccttgagatttggcatttcaggaaaaatgcctagcacaataggctgtagtttagagacttgctttgtcattttatatgtccagcagaaattgtcgtaactcccccggatgatcagatgctcccgtgcctctcctgtctctcagaccacacagctattatccctggcattctagttgtgagacaaaaccttaacacaatgtggtgacatttaatttagtgtttctcatttcaaagcccttaaaaatattaattaattcccatgaagccccaggaggcgtattattaatatctgtggcgcctttcatgctagtccattaatgtgccttctctacgcaataggtaagaaaatgaagctaaatccgtttttcgcagccccatgggataagaccttcacagagccagggtcagaaatgatgaatccttaattttattggtgtccctgaataatctaccccgtggccttctgtgtggcgtggaagaacagcactcctgttcaggagcaatctcaggagacagcgaatgattttcctgtggagctgtgacttcagcaatcctagttcgatagctgtgttgaggagagtagaattgagaaaaactgccgcagcagtaatgtaataagtgagatggagcaggaggcacttgacaatttcactagaaaatctcccagcgatctgtgggccctgcagtgaacccagcccctgcagatcgatgggcccgtgctccagggagacagatgtggagatcagcaccgtggcttgttcttattttggggtgccttatctttccgtgcctttgttcttcaccactatgcatgggggatttctgtagccttagcaaccagaaagcagggtggatctgtggaattagactccgaaatctcgagtttagttgacagcgctttttccttccttctgattgcctcgccgtctggcaagctctgcatgtgttcttttctcacctgtatctgcagcccatgactccggaagtctttctgactctgaaaaacatatcctgtgttcactaaggggaagtggttttaatgtgcatgaaaagaggctggcaggcgctcaccccacctggaccctagaccctggagaaggggtgggaagttagcttcagtggacgttcctgataaacgtgagctcaggtggctcacttcccctggcctgactgcagacttgagccaggaacacccattccgccttgtgtgtgagacccaggaggatcaaggagatatcctttagcatccattaaaaaaaaagttttttttgagtcctacctctccatttttgctcttccctacttgagctgtcttaaagcatccctggaggtaggaaaatgcatagaccctccttcccagggccccagtactgccggaggagcctcggtgatggctgcacctctgccctggggcctggagctgggctaacgctttcttggaaaacctctaattgtttctaccaagttagccaggacactttttaaaaagcactttcattaaaaatgcataggtatttgttttaatttacataacggcccagaccaaaatgggatgtggcctgctgcttagactggccattatcacgcctctgattcagagaaaaacctaaatttcatgtttatgcaggtcttatagctgatgcgtttggtttgaaggagcaggtgaactaggtcctctccaggacttggtgcttttttgttgggtgtggagagacatgggcgagatggggctgttgctgctgcgctgatttgaagccatctctccagactgaacccgtcctacgtgtccgccattctttctacctatccacctgaagacggaatgtctagctacctctacttcagacttattttctaatttagaatgtacttacttgagtggatgtggttttggagggcctgtagccaaggtcgtgacagctgaataaaatgtttccttctttgcccccagaactgcgctttcatttatcagctgcccttggtgtgttgtatgggatcagccaacattcaggtatttagaacattaagactcagtggcctggttctgtctcaccaagaacacaaataaacagttgatgaatccatcacatcagtgatgaatccagaatgtgtccatcattttcgtaagtcttagtatgcagagaatctcagatagcaaagcagaaaggatgatgtcacagacgccttgggtacccagcacctggatgcagctgtttgtacacacatactttctgatattatgttgacagtgacttacaccacttcaacctcaggcaggattctatcagtttctttactacaaattgatttgtttctttaataattattgtaattactgtcagtaaaaatctgagtatgactcagcaattagttgctggtaactgagtgtgttgtaatgctggggaaaggatataaaacttgtattttgaacagaaaggcacacatgtgggtgagcagtgtttaccaccacagaatttaccgtctacacagaattgagatagctgcacatgaatgtatagtgagcagtgtaagttaattcagagaaagaaaaaattatttcctgctgaaagggttcaagaaggaattttgtaggagagctgggcattgaacaggctcctccagaacatgtgggtcagattggccaccgcatggctggggtcccccatgggccagtgatgcccacctatgggagcaggtgacacgctgcctcccaggccacgcatcgacacccctcctgtcacgctccgtgcttctctgagcacttcctccttccctgtggccctgggctccctgtgggccagccctgtcctggcagagccccctgtgcgtgtcaacgcacatccttcatagatgaaaatggacttgaagatcccgcgttatcagttggttagctctctctcaagtctccttcgtgactctgctttatttttcgagcagcattctggttctgagcgaggagacactgagaggggagaccactctgtggctctaaccccgcctcagaccagggctccgcactgtcctgcagtggcacagggttgctagccttggattagcttttggttctctaatgggctttgcttgcaggtacaaaaatttgggggaacctggaaaaactcttaaatctcctcatctgaaagatattcatacatctactgatgacttccaaagtacaaggtctagaataccaagaggttttatgttgtcataaattagagttttaatgtatataattaggtgaaaccaaatgtgtatcatatacaacagagtaaccgtgttgcaggaattgggcctcgttttcctgttgttttcctcacatctaattctttttctctggaaatgccagggaacctttctttattttctttatttttatttttcagtagagacgagggatctgactatgttgcccaggctggtcttgaactcctggcctcaagtggtccttccaccgtggcctccgaaatgctgggattccaggtgtgagcccccgtgtccggcaggggaacctttcttaagcatgaatggtgtgccctcctcagggtgtgtcctctctgcttcctttctcagtcacatcagcaggtgcttcgtgtgcatctgtgtgcccagcctgggcacagcgggagcccaggccttccttcaaacgcagcctcccctgcacgttccaaacacttactggcatttttcttcaagtgatgatcatggcattggccttacttattttagttgtttttaaaagaaagttttaaaagtttatcaaagtgatgaacatacacatcactttttaaaaacataatccccacccagaggcaaacccttttagctatttgttctagtggcatatgttggtgctgctttgcactgactcatcaactcagggcatcttccctgactgcctggtgtggccccagcactttcacacccgttgttcccctccccaaccccagaaggtcgtagatttactctgtcggttcttctttgttgggagttcaccatgaaaagtactttgcaggaaaagagcaatgatagaactggagtagctcctcgcatgacccacctgtgcccgttttccagcatcctgccacccagccaggtctgtctcctccttggcccgttctcctcactcaggttctctggaagttggcacagttttactaaaataaaatcagcattcatagcattaggactatgtaaacactgttctcaagcaagccaagtcatgtgtacttgggtctgattctggactttgtgtgtgagttccctgggctgctggtctccgtgcccccagcctcgctgtcttaatgagaggccctaggggagcctgcagtgtctggcaaggccaggttgccctcagggctttctgctgccatgattttctggcccttcgtccctgtttgtttttccctgtgaccttcagtagcagcttagctccttggggtatttactgggaatgcattgaatatgtgaattaaacgagcgagagctgacatcttaagaatgttgactcagcccacccaagcagggagcatcttcccatttgttcacgtcttctgtgttttccaggagagctttgaaaatcttccatgtctgtgttttgcacatttcatgttaaacttattcctatgcattcagtctgctctgtggctttcgagatggggttttctttgccatgatgttcctttgtttattatttgtgtatatcaaggctattgattgttctctgtcagttttagattctgctcattcagggttaagggcccaggcaggaggcggagggaggagctttcagcagggcgattccttactcggtctcttcactcttctgccattgctgccatgtgtacattgcaggctccttcatttgagcaaattctctcttccatgctccagatgttttcagaaggaccgcgtacttctgagaaacacttggtaccccagtggcagctgcgtttgccttggtgttgccatgtgacaggcattacttgtttatctcattgttgttcctagtagttctcaatgtttgttgaatgaatatttataaccatcatgtgtggcagttcttatgtagtgttttgatttgtttttttgagaccatctcactctgtcactcaggctggagtacagtgttgtgatcatggttcactgcaacctcaacctcctgggcttaagtgatccttccacctcagctgggactacaggtgtgtgccaccacacctggctaattttttttttttttaattgtagagatggggtctcattctgctgcccaggctgatcttgagctcccgggctcaaccagttctcccaccttggcctcctaagctgctgggattttcggcatgagccagggtgcctggcattacctggttttatagatggagaaactcagagccatgtgtccaggaccacacagctattaactgcaaacccagaggaaagggtaggggatgagttccaagcattccctggagtccgtggtaaatttcttcatttcttctcctgcaacaggcccggtacaagcagagccttgacccaactgtggatgaagtcaagaagctctgcacgtccttacgtcgcaacgccaaggaggagcgagtcctctttcactacaatggccacggggtgccccggcccacagtcaacggggaggtctgggtcttcaacaaggtgggtgtgccttccagcttccttcccgtttctgccaaaagccatgccaattgcggtggtcggagcaggtcctgcccatccgtagcttctgttaagccattgatgtttactgtgtttcaacaaacccaaatgccataactgaacggaccaggtagtcaggcacaaggaggggctgtttctgtggcagaacgtgttcatggaatgactgccttgaagtgtggtgcgtgtggtttatgttccctctgtaagaccagcagttgtttgtaattctccgaggacagacctcgagagtgtctgccttctagtttgaaaaaattgcacaatttctcaatttcgttagaatctttctttaagcatcggtgattttcttagaaaataaagtgttttatatattctaaagggctaattccaagctgccctgcaggtgcaggctctgggcttccctcctcaaggtcagaatcaccagccttttgcaattccgttgcccaggaccagatgaagtgcttgctccccttctgtagctgttgctgtgggtggtgggtgctgactgtcatccccatcctccagggtgtggtgggtgctgactgttgtccccaccctccagggtgtggtgggtgctgactgtctcctcatcctccagggtgtggtgggtgctgactgttgtccccaccctccagggtgtggtgggtgctgactgtctccccatcctccagggtgggaaccttggtctgtctcagagcagccagctatgggtctcactgcgctctgcgtgatgcatgaaaagcagttcttggagggtgcggtggccccatatgtgcctgagcgtgtctatgagggcactgatttggaatccagcaaatccgagtcccagtttcggttgtgctgtcagcctcctgggcttctgcttccttagtgtggacaccgcctcctgccatcatagtgaggactctgactccgtttcttcacacactgaactctcggttcccgcctaccgtcccgggttcgcagctagcattcggcacaggtggtgaagcagtgtgggcccagagcagagacctcgaggaaggcttctgaccctggacactgaggagtagccagcctcggaagttagaaaggtatccacccagctcctcccgcagggcacagggcagtgccatctctccccgtgtgtatctggataccagcttgattttaattcctttcgttaaatattgagtaaattcaaaacgatcgttgtgaaggaagtaggatttacagaagcaggatgtaatgaaccaccaggcgtgcaccacaggcccctggcgtgtctttctcagctgcagtctctcctttccctgccctcccctgtggcgcctggcacagtgaatttgaatttgtccttccctggctctcctctgtggagcccccggtgtgctggctctcaggcacggcgaatccgggagatcgctgctgatacgctgggcggacgctggcgcgctcttccgcagtgcgctttgctcacttggtcggaggctctgcagattcatgccaccgaccccaggggcctgcagccctgcctcttcccacattcgctgtcccctgccgggaccccgcccttctcagtgccttccctgcagatgggcattgggctggttcccatcttgtttctgctgtaaaccgcgtgagtgtttcagctgcccacctttctctccagcactgggtgttgtcacaggttttttttaatgatagactgtggtgtgctctgattttctctgataaccattaagatcgcgcaccctgtgtccgcccgccggctccctgctgctcaaagcgcctatctgctatccacttctctctgcagtgggttgccttttcctatcggtttgagggaattctttgtattccagacagtaatgatttttatgaattgtgtctctcttctcagaatttatgatgtgattttttttcttcatcttcttacactcctgataacttacaaaacttttttttttttttgaaacagggtctctctctgtcacccaggctggagtacagtggcatgatcatggctcactgcaaactctgccttctgggctgaagcattcctcccacctcagcctcccaagtaggtgggactacaggtgtgcaccaccacacctggctaagttttgtatttttgctaatttttgtattttttgtagagccagggtcttgccatgttgcctaggctggtcttgaactcctgagtccaaataatcctcctgcctcagcctcccaaagtgctgggattacagcgtgagccactgcgccccgctcccagttgtgctttttatttgtccttcttgtcttggtgtgctggccgatgccttcagtggagtgaagtggggactgggtggggagcggggagggaggcatctttgtttctcttgtcctcgcagagggagagtttctgtgttcagtgtatgatgtttgccccaggctttttgtaaaacaaaaacaatcaccattatcgaattaagaaagtacaattcttaatttggttttttaaaaaaattgtgactagatgttgatttgcctcccttggttatttgtatgtgtgtgtgtgtgtgtgtgtgtgtgtgtgtgtgtgtgtgttaaagtggtcacagtacttttctcccttaggctggtgctacgttgaatgatactgtatgaccatctcctgttatacacacctttctttttggattaacctgtgttatgatgaatgatctgtttcatgcatggcttattcagtttgcagccattttgtttcatatattaaatctgtgttcgtgagtgagattggacagggattcttctttgtcttgctgtccttgcctaggcggagtaatcaataactgtggccttagaaaataagctgaggaatgttccttctttgtatatatacttgaatagtttttgtgatgtttgaagtatttgttgtctgaatgttgtggaacttacaaagaaagctctctgggtggtattttgtttgtggagagtttttgacttactgatctagcttctttcatggttaaagggtttttctgttagctttgccaactgacttttgcaggaccttgtccatttctactaagcttcccgatgtgttgacataaactggctcacaatacccctttagaaactcaccagtatcgggggtatctgtgagtgaggtgccttcctttgctcttggtgctgggtatatgtgccttctctcttttcttgttgattattcctgtgaggagtttatgtaccttttatcagtcttttcaaagacccagcttttaccattgttgaccctccagaggatggaaggaacagtaggatgaatacctttatactgttcccctgttgccaatttgacactttttttcttgtcccctgaaccatttgaaagatgcagacatcctgacactaagaacgaggatggctttctgtatcaccacattaccgtcaaattgctcaagaaatggaacatcagttctgtgtcatttactatagagtccatgtttgtgttttcccaagtgtttgcaaaatgtgcactaaattagtaggcatttttttacttgttgattttgttgtggacccagaatctaattaaggtccatgcattgcatctgttccttatgcgtttttagttcctcttgcctttcatgttatgacattgactttttaaatgactttttaaaatttaaaaattttgtcttcttttgggaagttaacatatagttatacatcagtcttttttttttttttttgaggttaagtctccctctgtcgccaaggctggagtaacagtggcgtgatcttggctcactgcagcgtccgcctcctgggttcaagcaattcttctgcctcagtctcctgagtagctgggattacaggcgcccgccgccacgcccggctaatatttgtattttcagtagagacggggtttcaccatgttggccaggctggtctcctactcctgacctcaagtgatctgcctgccttggcctcccaaagtgctgggattacaggcgtgagccaccgtgcccagcagtcttttttaaaataatagacatcattttttttaagagcagttttaattttacagaaaaattgagcaagtttattgagttatatacttccttcccctcattttcctctattgttaatatcttgctttggtttgttatgttttttacaattggtaaactgataatgatgtgttataattaatgatgtccatatttacactagggctcactcctagtgatgtacatgctgcagattttgctgaatgtgtgatttcctgcaaccaccgttaggttgccacacagagtagtggtgtccttcaagtcctctgtgcgccccctcatcttctctcccctagcatttggtcttttccagaatgtcctatagttggactcatatagtatgtagccttttcagacaggcttctctgactcagtaatatacgcttaagactcctccgtgtctttttgtggcttgatagctcattttttacaattactgagcaatactctactgtgtgaatgcaacactgcttctttatccattttcctattcaagggcattttggatactctgaacttctgacaattaggaataaagctattattaacgtgtgcaaatttttgtatggatataagctttccattcatttgggtgaatacctgggaatgggtttggtggatgattcggttagagtatgcttagctttataaggaactgtgaagctgtcttccaacatgtctacgccgttttgcattcctgccagcactgaacgagagtatctgttgctccacatgctcatcagcatttgatgttatcagtgtttggattttagccattctggtgggtatgtagtaggatcttattgttatttcattttcaatttcgtaatgatgtgaaattgggcgtctttgcatgttcttatttgccgtgttatatcttctttgatgaggtatctcttcaggttttttgcccattttaagaatcaggttgtttttcttgttgctgagttttaagagttctttccatatttcagatgccagttttttgtttttgtttttgttttgagatggggtttcgctcttgttgcccaggctagagtacaatggcgtgatcttggctcactgcaacctctgcctcctgggttcaagtgattctcctgcctcaacccccgaagtagcagggattacaggcacccgcctccacgcccggctaattttgtattttttttagtacaggctgatctcaacttctgacctcaagtgatccacctgcctcggcctcccaaagtgctgggatcataggcatgagccaccacacccggcctggatgccagttctttatcagatatgtgtttcgcaaatatgtccacccagtttgtggctgcttgttttcttttcctagtagtggatgttcgctttttgacgagtttggaccagtgatcctccaggatgtcccacattctagtttaatttcttcgctttttcacaagtttttgtcaaaccagattaaaaaaaagcatgatcaaaccttgtgctgtccatagtagatgtattttaaatacaaagacatatgaagtttgagagtaaaagaaagggaaacgatatactatgccaatactagtcatagaaaaccagtgtggctctattaatcagagaaaatagactgcaagatgaggagtattattgatgataaagagggccatttcctcatgataaacaggccagttcatgagccaggcacacaccatcctgagtgtgcgtgcgcttaatatcagagtttcaaaggacatgcagcaaaatgaacagaattaacaggaaaagtatgcaaatccataatcatagttggaggttagaagatcttcttttagtaattgatagattaaactgatagttaaaaattatagacaaaattgatagttaaaaaatttttttttgagatggagtctcgctttggttgcccaggctggagtgcagtggcgtgatctcggctcactgcaacctccacctcctgagttcaagctattctcctgcctcagcctcccaaggaggtgggactacaggcgcccaccaccacgcctggctaactgttttgtatttttagtagagatggggtttcaccatgttgactgggctggtcttgaactcctgacctcaggtgatctgccggcctcggcctcctaaagtgctgggattacggatgtgagccaccgtgcctggccctgtaattaaaaactttcttattgagaaaactctaggcatagtatattttttctagtccaaagcaaaagccagtattaatgtaaaagacctagcaatattatcaatcaccccgacttaattaacatttatacagccgtccacacaactgtagaatatacattctcaagtgcatgtggaatgttcaccatatgctgagccataaagatgtctcaataaagtttgaaagattaaaatcatagagtatattctctgttcttgaaattcaaaattatggaatatctggagaagccccagatacttggaaatgaaataccacatgagtcaaagacaaaatcataaaagaaaataaaaaataattcaaacctaaagataatgaaactatgacacccaaatttataggatttaggtgtaacagtgcttatggaaatgtacagctttaaattcttacatagaaagatacattttagaaatatatttaaaatgaaaatctgtttttttgaaacggagtctctcgctctgtcgcccaggctggagtgcagtggtgccatcaccacccactgcaacctttgtctcctggattcaagcaattcccctgcctcagcctcccaagtggctgggattacaggcgtccaccaccgttcccagctatttttgtatttttagtagagatggggtttcgccatgttggccaggctggtctgaaacccctgacgtcaagtgatcctcccaccttggcctcccaaagtgctgggattacaggcgtgagctactgtgctcagcctaaaatctaatattctgccttaaggaaacagaaaatgctgagcaaattaaactcaaagcagaaggaaagaaataacaaacagcagaaatcaataaaatagagtacaggcaacagagacaacatagctaaaatgtgttttttttgaaaggatcagtaaaagttgacgaatctctacgtaggtagatcagtgaagaaagagagaaaacactttatcaacatcagcaatgaaggagaggatatccccacatatcctataagcattaaaaaggtaagggaatattattaattttatatacatttaaatatgtaattaaatggacagatgccttaaaatacaacttaccaaaactgacctaaaatgaaatagaatatctgaatagccctatatcaatcggcttctttccaaggccatgccaggcatttaatccctgtgaggccaggggctttttattttgtttactgctacattccaagctcttaagatagtgtctgttaccctagcaggtgtttggtaattgtcaaccacatgggtgggtagatgaatggatgtttttatttttatgttttttttttttcaattttttatttttccataggttattggggtacaggtggtgtttggttacatgaagaagttctttagtggtaatttgtgagattttgctgcacccttgtagtcttttatccctcgccccctcccacccttctccccaagtccccaaattccattgtatcattcttatgcctttgtgtcctcatagctcagctcccacgtaacagtgaaaatatacgatatttggttttccattcttgagttacttcacttaaaataatagtctccagtctcatccaggtcactgtgaatgctgttaatccattactttttatgactgagtagtattccatcatgtatatataccatattttctttatccactcattgattgatgggcatttgggttggttccatgattttgcaattgcgaattgtgctgctataaacatgcgtgtgcaagtatcttttgtgtataatgacttattttcctctgggtaaatacccagtagtgggattgctggatcaaatggtagttctacttgtagttctttcaggaatctccacactgttttccatagtggctgtaccagtttacattcccaccagcggtgtagaagtgttccctgattaccacatccacaccagcatctactgttttttgatttttttattatggccattcttgcagaggtaaggtggtatctattgcattgtggttttgatttgcatttccctgatcattagtgatgttgagcattttttcatatgtttgttggccatttgtatatcttcttctgataattgtctattcatgtccttagcccaatttttgatgggatttttttttcttgctgatttgtttgagtttgttgtagatttccggatattagtcttttgtcagttgtgtagattgttaagattttctctcactctgtgggttgtctgtttactctgctgactgttccttttgccgtgcaaaaggcctttagttaaattaagtcccagctatttatctttgtttttattgcatttgcttttgggttcttgctcatgagatccttgcctaaaccagtctctagaagggtttttccaatgttatcttctagaatttttatagtttcaggtcttagatttaagtccttgatccatcttgggttgatttttgtataaagtgagagatgaggatccagtttcattctcctacgtgtgacttgccagttatcccagcaccatttgttgtaaagggtgtcttttccccactttatgattttgtttgctttgttgaagatcagttggctgtaagtatttgggtttatttctgagttctctattgtgttccgttggcctatgtgcctgtttttataccagtgccatgctgttttggtgactatggccttatagtatagtatgaaatcaggtaatgtaattcctccagatttgttctttttgcttagtcttgcttcggctatgcaggctgttttttggttccatatgagttttagaattgttttttctaattctgtgaagaatgatggtggtattttgatgggaattgcattgaaatgagtggatatttttactgaaatgtcatctgatcaccagatgtggcatgcacccctctccttgactctttagtcctcctggtgtggtctgtttttctccacagctttttcccagtcttatgtatattgtctctatgtcaccattaaaatgtgagttccaggataacaaggtctttgttctatgaaccgctttatcatgggtacctaaaaccaagcatctcagaacataggaaatggtaattcaatgttcactgcattctacgctaatgtcataaaagcaacagaatgatccctagagccaagtctttcttggttgtattttcccccactgtgttattccattagtttatcctttcataggtttattttgcacatcacgtggcatgccaccggagacaggcgcgtgttcttccagatctagacagccataagctgcactgtagagcatgcagtcctgttgccgagtctttcagccttcagataggctccctccatcaaaacgaagcctgcagcattacagatgatacactgtcggtacacaatgtaagatttaaaaacatttaaacatgctagttttaactatacttttctttttgtttaatcaccatttattctgttgctggttgttttctcagcctcagcagaaaactgaggttcaggccttaagcaaaatccgggctcagattttccccatgcaccgccctcccttgcattcccctgtctgtgtttcaggcaattaggactggcagctgtagccattaagaattcacgtagcggaacgtttatcgggagaaggattaatccactactcgaatactcccaattagcttttagaccctgtctgccttttcttctttgcaaaaggagaaaggtttttcccacttgatacattttttttctctgctttttagagttccattgtgaccagaagctatttccaccctttgctgtgtacctaggcacaaagctacaaggcttttccctgtgtgtacagctcatggtgccctctctaggtaggatgagctttgctccaggttacctgcctttccttaatttactgaacataaagttggagttttatgtggttttgcatttttggtttaggataatttttaattcttcggtggtcttcctgtggtgtttacaacctaacccctaccctctgccaaaatcatcctcaaaggccatttttgtcttgcactatgttctacccttacccctccggacattaaatagggacataaaatggatcttatcatggagagcacagacggaaagcaaagactgttttgttctgattgttggttataagtctagcttaaagccgaattgcatgatgatgtattgtgataatgtagggaaaatattggccccttcagagagagagagagttgtgccagcccagccatggtgggcaggcaaggttggagggggcctcctggagaaggcggtgcttgctcgggctgagtcttacagaagagaacaaaggcaacagttgtccctgagaggggactggaggggatgatctcagaggaagtagatgatataataaaccagcatggtattcattggaaactacaagcagttctgtgctatgggagcctggagcctgaattgggtttcaaaagaaagaaggccagaaagtgttccaggctaaggcatagagcacctcgcagactcttagggatgtgggcttagataaatccttttgatgccgtgtgaagcctggctctggggagaaaagactggctagagaaactccaggtagaaggccgtcgtatacaagaggccagtggcggcaccctgagtcaggctggtggggcgaccctcaggaccttcctaggacaggtggaggttgagttagagggagcaggtgagacctggactgtgaccaggcaccagaagcgagaagaaggagcttgtgggcatttgttctcaggttgtgagtaggccggaggtccatgagtatggggtcgtgagaagtaggggcagacatgctgcgggcggttcccaaaatacagtttctagagccgaagaaggccaagagagtgaaatctggggagcagaagaggatcctggcaggtgatggggaggagaattgggagaaaatggcatgggggaagccgggaagggtacctgtcagcccgggggaacagagatggaattgatatccattattccaaggagtctggccctttagcaagaagagcactttatattccaagtgaagcagtcctgttcaaaataagcagctccccatttctgagaagatgctgagtacatcttctgccagagaactcagaatgtgaatcagaattctcagccctattaaagtggcatcttctcagggctcgttcctgtaaagccccttaagggcacagccttcctttaaactctcagccaggaactgtggtctcatctggatttgccgccgcagctttccctggactaaagatggacttgtgccaccattctcagaggagggcaaaggacaggggtcagcagattcctcctcctcctgaagggggttcttgaatacatatcatccagaagcagggggtcgtggccccgaaaggtcaggagtggggggaagcggtacttgtgaacagacaactcgggagtatacatcaccagtaaaccccagtcccgtaaaatccgtaaggctgcaagcttattgtcattggtggtggtgtttttggtacttcctctgcccttcttttattacagttaaataattattccatgagcaattctaaataaatattatttaataggatttattggttttttgtttttttaattgggattgtcattatcaaatagatgcctcttgtgttggtatacagttaattgttgcttctgttgaaagatggatcatgggccgggcacggtggctcacgcctgtaatcccaacactttgggaggccgaggcgggcggatcacctgaggtcaggagtttgagaccagcatggtgaaaccctgtctctattaaaaataccaaaaaaaaattagccatgcatagtggcgggcacctgtaatcccagctactcaggaggctgagacaggagaatcgcttgaactgggacttggaggttgcagtgagccgagaccgtgccattgcactccagcctggacaacaagagagaaactgtctcaaaaaaaaaaagatggatcataaagcttttgaaatacactattatcagaaaaatacgtgatttttaaaaagtgatatttatgtcagaccacaattatcatttgttaaaattgttactttattcgtcttgagaatctagcggtgtccaagaaaaagttttatggtaaacttgacctttcttttctgagaaattctagcattttgtgtttgcttacagtagtagaaggccattaacaaaaactccatttctttgggagaagtgctggaaatgtttggagtatttctttatgagagcttaaactttaacaaacaaatgatttccttgatgccaagagatacaaaacctgagagtgcagctgcactgacttcgcgggtgccctgcatttaaaaccacggtcatagcgctgcggtgcccatgcttgagtgcgcccagcatcacctgcaggctcacggagccacagactgccaggccctccctgagcctctgcttctgtggccgtgggtggggcctgacgatttggctttcttgggtgtcccacaaaattgctgctgcggccgcttctgctgctgtctgggttgtctgcctttgagaacccctggtatggacagtgtggtgtgagaggcaagcaggatattcatcttatggtttggggtcactctgcttcttacgtgtcgggagagacacttccccgaccccttgttttccatctctaattttagccgtctagggcagaaacagtcccgggtaaacaccaaggcctcgtgggaggcacctaggaggtgaggaggggctacgtctgccgggtctccaagcaggagtgagaaccagctagacaaggggaggcctgggagtgcgagggggctctggtgacaggaagtagtcccctctgacccggtgacaccgtggggagcaggtgatgtggttccagtgctctgtcatcctggggtcagtaggatgaaagatgtcgtagcagcacaggcagcactgtggaaactgttctcacgactgtgagtcattgaggctcctggacgcggcggaagtgcaagcgggaaaaaggatggcaagttgagtaacctcaggggtaagcaaggaggtgtgagaatcactcacttcctcggcagggcctgcacgcacctggtgcaggagcagcagaagccatgctggctcttcctgctgcgtgtgcatctggccctggaaagaggcacacccagcagcgggctctcctggctcacccggggccgtcagggcgctgcagtttgcaggagcatcctttgggctcttacctcagtcggtggggctgggcagctgggtgtctccagcccatcatgctggaacatgctggaagcttcctcagggtactcgggcttattttggtagtcatacacatgaaatgcactttgggggagaaggatgaaatattttggttaatccactgaaaaaatgaatgttgaggaacacagccagctttcctgttatttattaataggcttaagatagccagaaggacatttctgctagaaagttattgccagctgaaaaagaacaagtcttcattattatccaatttggtatatatatatatatttcaggtttttatgaagctaagggcaaaggtcagctgcttcctattccttgtggattgtgctgctgatgggaacttcctttgacttcacaaatacaagggattggaagtgcattctttgttatctcatatgtaagatgaggcttttaacacgattttcttttagttaattttaaaatattttattataaaattcattttttttcaaatggtgcagataagcataaaataaacaataaaagttcttcctttccttccctccaagcctttgtgtggcacgttcttggcatgttgcaaagtgccgtcatcatcatcatcatcattgagtttggaagaggaaatgataagttttatttttcccttctcaaatttttgaatttgaggtgtcacaggcaatcaaatgaaaataaccaactctctgtagaggtggtagttgcagctgaacatttttgggacttcaatgtttaggcagtatttaaaaccagggagttatatttgattgcctgggagaagatgtggaataagaagaatggaataggcccctgacgataagtttttaaggggagggtggaagggaggggtcccaagctgggaaactttggaagaatgagctgaggcagccggagacctggggagagagtgtgtgtttgaggggagacggcgcatagatgtcaggtggggcaggaatggaagagaccatgggatgcagcatgtgaagaggtgactatgtgttcagtaatttctggagagcagttaggatcaaaactaggtttgcatttttaaaaaacaatttgaaataattttaaatgtacacgagagttgcagaggcagcacagagagttcctgtgtgtccttcatccagctacccagtgtcaacctcttacatgacctcagcacagcgatcaaatctaggaaacatatgttgttacagcactgccaaccacacacagcctccttggtgccagcagccttgccgctgtaatcctctgtatgtcttgtggtccagcccaggcccccacccacattggctgccttgtcctctggtcctcccagcctgggatggttcctcagctgttcttgtctttcatgaccatgacattgtaagatgctgctcaggtgttttggaggatgtccctcactttgggtttgtctgatgtgttctcatgatgagattgaggatcaaagttttgggaagaataatgcagatgggttattctcagtgcatcaggtttgggggtgcgtggtgtgtgtgattcttattactgcagataccaaccttgatcactaggctgaagtggtgccttgtgtgtttctccaatgtgaagttgttattttctttataattcataagcatttgaaggagatactttgagagtatgcagatatcctgtttctccttaaactgccatgccctaattctaacattcatgtgtaattactatcctggtgttctaatggtggtgctgtacctccctatttccttccacgtttagtaactggaattcttctgtatgaaagaattgttgcttctcttgttgtttatttacttggttgtttgtttatatccatatggagccactaatatttattttacttcttgggttataatccattattattatcattatttattttgttactgaaattgtttcaactttgaccactgacacaccttctagcattttctctaccacagccctggatcaaccatttttccaaggatctttggcttttttgagagtgggatttagaaaccaagatgtggcctctttgtgtgctcgttactactggagcattagtgttactaggcctaggccctctccgtggacttagctaagtgatgcatttgtgtgtagtaagctgtaaacacatgcatattgatttgcgtatctatgtacaggtgtggaaactagattttaatgactaaacaggaggtaagggactagggactggaatagactaatctttccagaagtttggtgatactactgaataacactgttttttctagctttctctgtaatacaatttttgcaataaatacatagagagcatgtgattagaggagcctgtctgttggggagacctcgaagaaagaacaaggctaagcagggatgtttagtttctgcaagaggtaacttatgtttgtagataggagaaagggggttgctgaagaaagtataaatcagtggagtaaaggatgagaaatgggaaggtatgagaagattaattcaggacagagatacagcatttgacttggcaagcccaagcactcttctctgagacgtgggagggaaggagaggtgaatacaaatgtggtggagctttgaagctggacatgagagctggttccccttggagcctgtctcctgttaagtgagaagccaggccatgtcctgagaggtgggggccatgagtgccaggatggaagggtcaggagagaggagacatggcaacccaccccttcctcatgtttactgcctggcatagttggcatttttctttatgttgaggaaaatgctgctatgatctgattagtaggtgctaaataccccagtttgtataaagtaggatggtatctttgcagggctaatgaaatggccaaatcaggtttgggtaaggccacctggagatccatgtccttcagctgatggcagtcttcctgtgtatcccagctatccacagagatgcttgcgagttctaccatcgcaacagcggcgaggccaggttctcccatcccaacagtggtgaggccagaaatttccaggctcatcacatctacctgctcagcctgtggtgggttggagttggggttgggacaccccacctgcccttccagagggcgactgtctgcacctgcccagtgtgccccccgttccctcctctgcagtgtcagagctgctgtgcctggatctgaggaggggccgtgggagaagaagccgcccccacgacacttgcgcttgccttttcagctggagcacggggtggcggcaccgtgtcgttctgcccacctcacccactgggatgcaaacttgctgaggccagggcttcttcctgccatgccttgccaccacgccccttgcctcccctgggacatgccgttctcttctttgtactcatctgtttggtatgtgaggggttttgcgttttgtcttctgctctgtaatttaaagggataaaacgctcacatttaacttaagccaaaacccagtttcagtctttccaccagaaatccctgagatgtagaattgtgggaagctccttggaggctggcgggctgctgggctgcccctctgtgggaagacagcctgcaggcttcagtgggctgggctctcccggccatggctgccttggtggctaactcaggctgcggcgacagactggtgaggcaggcggactcttcccctgatgtttaatataacctgacagataaagtggattgtaatgaagaaattatctaaaacccatttctatttctttgtttgaaaagaaaacatggccttgaatatgattcttggagaaaaagaagagacgctttgattaggaattattctctgtacttttagttttggatcaagaagaaatgaaaaccattggccacaagctcttgagtgttccaagcagccttccgtgtatacagggggcttttcaattctgggctggtgtgggttggtgcagtcaggatgacagaggaatattccacaggacaacgaggagtgactctactgtgggcgttgtttctgcccctgcagccggggctgtgaggctgcaggctgccctttgctggtttgcaggggccataattctggcctggagcttgacaaacgacccaggacctctgagatgggaaatgaggtctgcatcccgtgttctaatcaggattcgctatcaaaggtcattttccacactgtggcttaatagagttggttttatattccctgagggatacagacttccaaattgttgcagtctcactaactgtaatgtatacagctcatgtttgaaaggaaatcgcctctcctccaaggcagcggttctcaaccagggaaacttttcccctcaggggacactgggacatttggcaatgtccagcaacctggagattgtcacatctaggtgtgggggtggctgggtggtgctgcggaagattgtgtggtgcacagggcagccccacaaggagcggcccggccccaaatggccctggtgctgagagggacagacgccgctcacagagaagcgaccacagaggcccacatccaagcaggcttcccagagcaggcggggctgggaaagctgttctgtggcgcagcatcccagtggctgttacggggtgaaagcccctcttagaatttaaagtcctagagcagagaccaactggggccatccatggccctgtgccgtgctgcctcctggacgcacgctaggaggtggagatggtccagccccagcaggactgggccacgaggaccctgccggtaacctggtgctcgccgcccacagatcacggggcgtggagggagagactgccagtgctgtcctagtgcagcagtacctcatggttatgacggatcatcttcctgaactttgcatctcagaatttaaaatggagattttgattttgattttggcaaatgtggaaaatagatttcagctcaaaaagcaagacctgagaacatggtgtgttaaaatatctttcatttcatgccactttgcagccctgggaccctcggggttgtacctagaaggtagtaaagatgacagcagcccccgtttcactgatggtggcgcagaggacgttgtgaggtggctgtagggtcaggtggctgtagggtcagggctgggcaagttgtattcagatgctgttcgctaagcccagaacattataggaggtaaataaatagcacgcagtgttctgggggtaaaaagatacacccatgtcccaggctgctgccaaaatcctttctcctgtcagcgtggggggtgatcctgcccaattaaaggacgtcttttggcccttctttcccttggcagcagcatggaagtgggtgggggaggagaggagcatgcttcccccaacccctggggacctgtgagcgcagcctgcaagctccggctccaggaggaagcgtgctcaagtgcacctctgaccacgtcacgctgcgagaacgtgggcgctacacctccgaccacatcgtgctccgagaacgtggacgctgcacctctgaccacgtcacgctccgagaacatggacgctgcacctctgaccacttcctgctccgagaacgtgaactctgcacctctgaccacgtcacgccccgagaacgtggacactgcacctctgaccacatcatgctccgagaacgtggacgctgcacctctgaccacatcatgctccgagaacgtggacgctgcacctctgaccgcatcatgctccgagaacgtggacgctgcacctctgatcatgtcacactccaagatcatggacattgcacttctgatcatgtcatgctctgagaacatggacgctgcacctctgatcatgtcacgcttcaagaacgtgaacactgcacctctgaccacgtcacgccccgagaacgtggacgctgcacctctgaccacatcatgctctgagaacgtggacgctgcacctctgatcatgtcacactccaagatcatggacattgcacttctgatcatgtcatgctccaagaacgtggacgctgcacctctgaccatgtcgcgctggccagaatttggctgcaggacagacttcactggaaaggaaactgggccatgtgctcagctacaactgctttagaagagagagaaaatcagatattagcctagcagtctctaccacactggcatttagataattttcagcttttttttttaccagtcaaaacatctcatgtacaaatgcaagtatttctataggatggatatctagaagtagtcagaaggaatgtgcctttaaaatttttgttaagtacttcccaattgccttccatacaagcttcattaatttacattcccaccattgatggatgagtgccctgcatcctcccacaatggggcattattcacattttatcctgctttccactttgctgaataaaaacagaatggatgaatgaatggatgggcggatggatggatggatgaatggatggatggatcgataggtagatagatagattctcattgtaatttgcatttctaataaagagcatgaaacttagaatcatttttgattcatttttcttctgtgaattgcctgtttgtatgttttgcctgtttgttttcgttttgtcccttgttgatctgcagcagaagtttatatagacacatctaaaaaattctctgtcatgtactgtgtacctcctttcttctaaaattgctagtcattgatatgtctttattagaattatagatttttttatcttactgtatcagtcagtctcaagacttattaggttttgtgacttgcttaattaaggcctttcatatgccaaaataaatgaaaattttcctgtgcttttacatttaggttttcagtccactctggggtgtgtgtgtgtgtgtgtgtgtgtgtaatctcagatagcaaaataccaaatggctggttagagtttccagcatcagttattgaattgttaattccttctttgcagatttaaaatgctgtcctcattagagttacgtatgtgggtctatttctggactctctcttttctgttgatttgtttgtctccctcactaataccatcctgtaattaccatagatttatagtatctttaatatctggcagtgtgagtccctattcattattctttattaatttttttttgctcttgtgcttttttttttctctgtactatataatcatcttgttaaattccgtgaatggaaaaaacccagaaggtattttgattaggcttggactgactttctggattcattaggcaagaattgacatctctagatccttcagtgggtttatttacagagagcatttccaggtgttctattatagagcagtgattataaacagtccaccaaacgcggacagttttaacaacatgtttggcagagcacaggtagaatggggtcctgcccacgatgatgtacgtgtctccacacaccccccacacatctgcgtcgttggtatactgtatcatcatgtctgagatataacttacgtctgagatgtagctgatgtctgaaatgtaacttttgtctgcttctttgctgtgcacggacaaagcttctgcaggcttcctgcacgccatacttccccaggctttgctggatctggccttctgtccctttcctcttgagttataaacaatcctgtaggcagtaccagcggcaggatatgtggcttagctgctaagaaataaactcacttttactgtgactttgatttttgccaatttctgggaatttgatttctgccacagcttcactacttacactcttgatgtccaaggaaaggtaaataatgaacgtgttctgtggagaagaattccttaaaaatgttagctttgcgttcggattgtaagtgtttctcaagtgagatgagaacattctcctctgcatttaccagaatcactagtgtctgttcaggcgctgaacagtatggtgtgttctgaaaaatgtttcactcagcagattagtgttactaggttattgttctgtgactgaaataaatttatacagccaaacccacttataccccttaagtatgatctttcaaaagtcatctcaatgacaaagtgcttatggacctctctgaaattaaagggacagtggcatgcaaatttgaggacccggccaactcttagagctcccctcccttgtaaatgatgtgtgtgttgtgttatataaacccagagatgtgacagagttaaaggacaaatggagacacggagtgaagagcacgtgtgtgagacagctgtgggtccatggagggaggccccgcggcgggaactgaggcagccatggggtacatgagggaagccccacagtgggaactgagacagctctggttccatggagggaggtcccgcagtgaaaactgagacaagtttaaggagttgaccagcagctgaacccagcggcagctgcggaggagcctggggctagggatgatgactttggcagccacctggtgtgggcgctactggagtaaagcagcatcagaggagatgtggagaaattcagtttgatggtttttgttttttgagactgagtctcgctctgttgcccaggctggagtgcagtggcgcaatcttggctcactgtaaccttcgcctcccgggttcaggtgattctcctgcctcagcctcccaagtagctgggtttacaggtgcccttcaccatgtctggctaattttgtatttttagtagagactgggttttaccatgttggccaggctggtcttgaactcctgacctcaggtgatccacccatctcagcctcccaaagtgctgagattcaggtgtgagccattgcgcctggccagtttgctgttttttatagttttgtataaaggctaactcagcgtctctccagccaccaggctcaatgtgtgtgccttttgtaacggtgcagtactcaccagcagcccatattcctgagacgcacatgtaacgagcgcactttgtgtgttttctagaactacacgcagtacatccctctgtccatatatgacctgcagacgtggatgggcagcccgtcgatcttcgtctacgactgctccaatgctggcttgatcgtcaagtccttcaagcagttcgcactacagcgggagcaggagctggaggtgagcgctctggtgcttggagagcggtgctgggtttggttttgttttccctgggggtggggtttgggtggggaggttgggaggtgttggacatcctctgaatggagcagggctcagaatgccaagggcaggatggcatattcaatgctgttgagctagggaggcactcagcacactttatttttgaaacataatcttgttctgttgcccaggctggagtgctgtggtgccgtctccagtcactgcaatgtctgtcacctgagcccaagcaatcttcccttctcagcctcctgagtagctgagactacaggtgcacgccacgccaccatgcctagctaatttttgtagtttttgtagaggtggtgtttcgccatgtttctcagcctggtctcaaactcctgggctcaagcaacgcgtgtgcctcagcctgcaaagttctgggattacaggcttgagcactgagcccggcccagtacaaacctacagacttatttttacatctcattttactcagtgtcatttttaatccaaacattaattgataacattcatagggtcgatttgtgccccagcagtctctgcctccaagataaatgtgaaaataaagcagacacatttattttaggagaaatggacccacagcttcagttccaccagtgcctttgttcctgccccggtttctttttctgttgtgttaaaaaaaaaaaaatccccgaaaaccactaagctaaaatgatagaaaacaaacgaaaacagctactgttgtagcgcccacttcaaaaagcggaaagcctgtgcaccgctctgctaatgaagagacattttgcttggttgttttaattaatatttgatgtttgaattaaacagtgaattctgaggacaaattgaagaggcagtttcgattaagaggcctccatcttgtggcctgcacaagagtgtcagaatgaaatattctgcagcctcaagggggtcatgagttctactggttgcagtataggaaattctcaatttaggagcaaaaatgatcttgagtatgtttcctcaagcctttttgaatatattcaattttaatgtattatgttttcacatttcatcatagaaaaatgctgaaacaatcagtaacaaaatttgaaattctgtttggtagattttcacattaacatgtgtacagttgaatattttataattattaattctttatgtggaacaccgcaaaagagtgactgataagtataatgtggtttatccatgaaaaaggatccacatgcaacaagtttgtttgttttgttttctatgataagggaaagaaagatcaaggtttgtatcatcagatttttcccttgctttcaggcatttcatcttggtttacccaggggataggttatctaatgagcattaagaaactcaaagcattgagaggtaatttatttttccttgcatcaagtaataaatatcgcaaaaaaaaggtgatttttttacatttataatatgtaaataaaaatgccaaagaatcctgcctgagttctacaccagatttatgggctggagagtggttaagggaaagaccaatacatcagcctcagttaattaaaacatgttaaatagagacccgctcccctttcagcagaagaccagcacctccagctcatgcataataccaaatgcttgcattccagcgctttgagcatgtgctccggcagtgctgtgtgtgctctctgtgtgttgccagggattaatcagcctaagacactgttcatttcatcaagtgtaacagaaaagattcccatgcatcttttttaggaaaaaaaaatgtttgactcattccacatgaaagagatcagatgaaaaatatgttaactgagttggcgaatagatggcaaggcaatgcgataccgtatgtctttaattagctctgatttttatcttcgttctttaattacaatgtagatcagtcttgtgtgtttctattacacttactattattggctattgttcacttggtctcttataaaaacagtggaaattaaaatgataaaattagctcctagctaatagcttaatgttcattttagtaatttcactatctgctagagaaacagcaatcctgtgtagcctgttagggtttttcttttaaaatattctttgcctctttacagctggtcaaattctttgtaaatttacaatatgttttaatactttttattgtataacatgtgagctgaaagaaattgacaggtgaatgatttgttccagggtttaaaaaataaacaattgattaaatataatgcaagaaaatggttatttggaccagaaagcctccaaataataaacattaacacaaatatgagtgacataaattttaagagatggtgatcagctttcatattcttagtggcacagtgcttgtcctgggaccaggaggtttatttattgtttacttctctctcagaggagtgctgtaggtagagtagaagacgacttcatcaaagcacagatacagtattgcacacacttcaaaccatcagagccggaaaatgacatatctgtcactcagtaatccttcttatatttttattgtgtcatatttctttgtaatttaaaaattaaggataatattcaagtctctccgctttcagtcttcttttataaataagtatattttaccaaattagtatatgccatggtttgaaaaatcaaataatacagaaggtttatgatgaataaagtagtccctggccccacgctttctctgctgagactctatgaccaaaggcacctccttcccctgtttccatttctagttcttctggagggtgtctccttccctgtagatgacatgctgagaccactgcttcttgatttgtcgtttttagattatcagtgggctttgtcttagggtacaaaccaagaacagagctgccattaagttctgtttaaagaagggagaaacgatgtggaagcctgttagcaaagaagtcaattatgtgtagattacatgctggtttaaattcctatgtgttatttgtattcagtagtgaattctaaagagaaaattctagattgaagaggctgcgtcactcacgacgccttcttgcgttccctcttattcactctattgggtttctttatactttgtaaactttgtggtttcaagtaatatccttatgcttttatttctagttttatcagtaatagctcatttcttccattttcaaggctcttagcttccttgtactttcttctgccttttttcttttacagcttctgttatctgcactttctgtgattgtctttcgttctctgaccacgattaacacctctgtgcttgagtggagattgattctataggaagacaagcattaaaccttgtacctgattatgaccacataaatattgctcgctcagtggctagagtactgtgatttccatttttataactgttttcgtttgtttgcttttcctggacatttcctcttttcttcttgaattacctatcgttaccacttcctccactgatagatccacaaggagagcggagagcacagaaggcgccctctcccctcacatcttccaagctctcctgcctcgctcagccgatcgtgcctgtggcctgctccccggcgtcagctggctcccctttgtaattctccaggatccgtccctgtgtctagatcccacttcttcccctctctcgattttctcctttgttctcctaggggaaatcctcaagcactgccctaagaaaggatgtttggcagtctgagaccatcagtatttgaagcagtggaagtaatgaaaaatctcattactgggttttaatcaaatagcagtttgtctttttcactaataaggtctctgaggcaaatgatgacttttcagcagtgccactggggaccaggcatccttagccgactggctttatcctcatgtttgcaatatgcccaccacatctgcaggtgtttcatctgcttgggaggcaggaggaaatggggaaggggcagtgctggccacagctgtctctttataaggaagaacagcccgccctctgtatctgtggcttccacatccttggagtcaactaactgtggctccaagacattcggggaaaaaaaattgcattgtactggacatgtacacttcttctcaccattgttccctaaacaatatagtataacaactacgtttacagcattcacatggtagtagatgttataagtagagatgatttgaagcacaccaaagtctgtgtgtgggttatatgcaagcaccacaccattttatatctgtgcattggcagattttggcatccatgggggtctaggaaccaatgccctgtggatattgagggatgactgcaacaagcagacttcgctttagaccgagttggccagagccaggtcacgtagcaccccaggtgtggttgaggggtgactaaagggagtggacttgggggtggctgtgagatgatccaatgaggaccatcagccacattacctgggtaatgtcatcattctaaccacatccattatcgatagtgtagatatggaattttaggcaattttcactcttccagtggtagccctgttactccttgcagtggatgagtagatgttcttgataagtctgccacctccatccagataaatgccataagaggaatatttatagtcatcgtacacagtatatgtattgactgagttggagagagagaaaaaaagagaattcaaatgttttttaacaacttttatctggatactaaatccttagcctgtaaactagaaaggaaggtgaagtcttaaagaaacagatgctcttggaaacggagcccatgaagtcttgtccgtcagtttcttctagaggatatttctcaagggcagtcacagctcaccgtcactgaagacggcagtcaagcccggagtcaaatctaggcgagtttctcctctttttaatgggaggccagtagcgagttgggcaggcggtaaagataataatgcctttcttctgctgggacagcacgggctccactgccccagtaagtcttgttctgcacatagccatctgcttttggtttagggctggagcataggcaagtttttggtgggagccatggaaatagcctgagaatgacttcctggagagcaggttgctgtgtgtcagaagagtcttgtatgaaagttcagccctggccggtgcggtggctcacgcctgtaatcccagcactttggaaggccaaggtgggcagatggcttgagttcaggagttcaagaccagcctgggcagcatagcgaaaccccatctctacaaaaaatacaaaagttagccagctgtagtggcacgcatgtgtcatcccagctactctggagaccaaggtggaagggtcgcttgagctcagagctggaggctgcagtgagccgtgattgtgccactgcacctcagcctaggcaatagagtgagaccccatctcttaaaaaaaaaaaaagttcagcccatggatcatgggcacaattcacttctccactattcccccgcactctgcaaggcttttctcaggatgcttccgagtaactcgtgtttgtgtggtgtctctaaacacaattgtgtggtccagtcctgccacctgtagcagtacactcccaaagcacagaaacctgtccgacggtcactcactgccacagcgagaagcttgcttgggtccacagcctccccaaggctgcagtgacttaaccgccccccgcccctaccaatgtgaaaacctatacttaaactgataggtgatacattggcctcctgcactgatccccgtagctaaattttatgtcaaataaatattgtaattctgccaaaaatgactaacgtctagaatcttcaagtttcctcaaaaatattaaatgcatatctcacagatctaaagtactcatgttctgaaatcttcttcatttctttgctactcttgtagacaggcacactgcttggctggcatggaattctgcagcaaaaggcagttctcctgctgaaggttgtggttgtagtgattgctgaataccatcagttagttctttgggtacctctcaacaggtgtgtttcttaatcactgtttcctaaattggaatttgtgtgtgtgagtttgcaaatcttctccacggactcaccgtcgtcatggcatttgtgattcagaggagggatctgcggtgccgattccacaggagctcaggctcgcctgtatttctctttcaagcaatgattttcataagtgctttcccctgtaatctcatagttttgtcatttgtaggcagtagggacgtgagctgacatgtgttaggtcacaactttattaattttcaagtgatattaatttttaggtttgaagaagatgctttccccttttctaagttgtctctgtttcctccagcataattttttttcctttggttaatttagattattctctgtcatactggaggtatgtggtgattttattgtttgtcatatttaagaatgaagagaagctgcccatcactgcgtgtctgtgacaggaggcgttggctagagggccttgctcgatgggaagtagggggcgctggctgctgcgctggggactcatggatgcccccatgccgaggtctttatttctctgggctctaaatgactacaccagctgcctttaattttccccagatatgtcagtaactctctttagaggaaaaaaacccaccaccagcctgagtgctttccggcaggggggcggtggtggaggatcattgcagaacacctggcttcaggcacacaggtgagacgccggctgtcctgatggcaggtcttcaggtaatctgtgccttccagcccgcaccactccaggcttgggcatgggggctgccttccacttcccttctctgcatgtgctctggacactttcagttcctcttttttaacaaaagttggccaaagtcagttttgcgtaccttatactttatttatagtaagctgtaagaacccatacttgtgaaggttttcaaaacattagaatatctgctccctggtgttaagaaatgtgtaatatagttgaagcacatatattcattctttctctctctttttctcccccgcccccccgccacactcactccaccaccaccacaatgaccaaggagaagtgcatttttcatttagcagaaatgctgccatttccactgtctatagcagaaggggagttcgtccaaaacatacagtagaaacccctttaattggaatccacagaacggccatccccaaagccccgctggggagaatgaagccactgtgagaggttaagagggtgggggggcagggctggcccttggagtgggctggcgagctgacttgccaaccagaaaggaaataggtcacgggagaaatggggggaaacacaggcccatggaggatgaggtccacgcctgccagtgggtgctgggagggcagccccagggggagcaggcagcaggagatgcccagcccggccccgtgtacctggcaggcctcagcctgtggacaccctcgcctttggtttgtgtgacatttcacagttggtgggacatttgtgccgtttcatccatctttagtctgcgcagctgagctgaatgtggccgccaaagcttttgctgcttctctgtgcccatgcaccatccctttctgtggtttgcacggggagataaaggtcttttttgttggcacctttcgtaactccgagtcctagaatttggaggcttcagtaaaaagaaaagtgatttctctgcataaaaaatttaagaacccttaccgctgatgaccttaaatgaatttcacagacacgtgtcattagcacaggcagcttccagggtgcaactgaagttcccctttcttcacaaatgcttcccccagcctgaaatcttccttggctgaccacatacggcaatctcctacacagcggccttgacaatcatgtgttgtcttgtagcctctcttctactgtcataagcttactttacatttgttatgtaaacctgtcaagaatgcctcacgttaaattgatgctcaggaaggatctatagatttggcttgataaatacatatttgaataaactacctttagttgtcttctttagatgtatccatgatgcattaaatatatttgatcttcaattgatttgtatgaaatgtgagaagaaacaaagaaaacttgattagccataattcatgaaaacgatacactgtttgcagttgtcataaaactgggagctttcccaaaaattcttagagtttaaccttttttttgtttctaatttcatctattttaaagtattgtctgaaattgcttgatattctggaccacagatgatggccagcaccatgggttgcagactggggcactgtgatcccagcaggacccatctgcctggccctgcttgctgtcgcgggaacacctctgccgccaccacggaggccgaggggctcgccccgccccgacgcggaggcagatgtctttcacaaaggatcctggtggcacagggcagtggagtttctggctgaaggtggagcctcatgagaggagaggggcaagtgggaagtaagtgctttcactgaacactgaggtcagaaacacggaagaggtgttcattctcacccatcctctccagcatcacacgataagtccgtctgcgcagaaggcaagggcaggaaacaggcatagagatcagaaaagaagttaggccatcttttcttgaagtgatcacctgtgttgaagtgtcagctgttaagtatcacagtgggatttacaggatactccctccagcagcagccaatacacacacttttccagcgtccatgcggcattcatcaaggtcggtcacatcctgggtcataaaataaacctcaacaagttttaaacagcacagcgtgtgttctttaaccacaagagaatcagctacacgtcaataaacacgagaaaaaactgtgaaaaaaattaaacaacgtatttctaaataatgggtcagaagcctcaagggaaattaaaaaaaaatacatagagttagatgaaaatgaatatacaacatatctgtatttataggatgcagataaatcagtattgaaagagaaatttatagcactaaaatcttatgttagaaaagaggaaagatgacaaattattgatataaattcctacttcaagaaattggaagagtaaaataaactgaaagcagtcagaagaaaggaaataataacagaaatcattaaaattgaaaacagaaaaacaatggagaaatattaaaagctgattctcagaaaaaaaatcaataaaatggatacattcctagcaatactaacaaaatagaaaaatcaagagggagatggaaaaacctctacagatcctgcagccatttaaataataatgaacaactttacactcttaaattcagcaactgagaggaaatggaccaattcctcgaaaacccccagctaccaaaatccaaccaattgaatattctgagtattatctgttcagcaatagataatctgaatagtcatagaatcatgaaagaaattgaatttgtcatttaaaattgtctgaaacataaatctgcaggcatacatggtttcactggagactattgccaaatatttaaaaagaagaagcagaacaccggttttgtacaagctcttccagaagatagaagggttgggaacacatttcaactcattttatgaggccattattatcctaatgccaaaaccagacacaccgttcaaaaaaaataaaaaacagcaaaccaatatctgtcacaaacttagatgccaaaatcctcaaaacaataatagcaaatcagttctagcaatttataaaaggaattatacgctgtgacttagtgagtttttttacgggtgtagaagtctagttcaatgtttaaaaattaattaatgtacttcataccaacagactaaagatgaaaaatcatacgattttaccaattgatgcagaaaactctttcatgcgagagaaaacaaacaaaaaaaaaactttcagtgaactaagaatagagaagaacttcaatttgattttttaaaaaatctgtaaaaacctaacagccgtccttttacttactggtaaaagactgaatgtttcccccttaagattggaagcaaggcaaggatatccattcttatcactgttattcaacagaagtactggaagttctagccagtgcaataagacaagaaaaagacatcattggttatcagggaaacgcaaatcaaaactacagtgaggtgctacctcgcgccactagggtggcagcaataaaacagatgggtaataacaagtgttgacgaggatgtggagagattggaatccttgcacactgctggtgggaatgtaaaatggtacggctgcttcagaagatagtctggcaaggttctcaagatgtgaaactgagggtctccccgtgacccagcaggagagtggcatgcactctagaatagcgcttggcccacactgggcactcagctgacccctgctggcttggctaatgagcagagtaaaaacactcctccctggcagtgtgggggccttccgagtggagggtggtgctggtgtgggggccctccaggtggagggcagtgcaggaggccatggcaggcagtggcagtgcttggactaaggtggtagatgttggcaaggcaattgtttgcatctggggttcgttgtgaaggaagagtgattcgctctggatcagatggaggacttaggcaaaaggagttaaaggcaacaccagtgttttggcctgggtggaatggagcagctgtctcccgagccaggaggaccatgaggctggagggtggatggaggtcttggggtgcaggacacaagagctctgctcaggcaatgtggggtgtggggtcctatcagagatgtttgttcagcatctcctgtaaattaggaagggtgacagggcatacagcagcacgcaagtggacaaaccctggctctactttcctgagaatgcatcagaaggtggtcggtgtcatcctagaacagacaatggctgaagccacgggatggtgacgagcccccatgtggttcgtgtggctggagaggagaggccagtcgaggcctgcgttcggtggtgtgtgtagagtctgggaaaaggagaggcactgacagaccagaccagagaagtagccaggcagttggagggtaaccaggcactcgtggcatcaggaagtcaggaaaagcctcaggaaagccttctagaagtagggacagttagctgattgctgtgctgttgagcggctcacacgaggaggactgaggatggaccgttgtatttgtgcacacggggccattgctggatttaacaaaagcagtgtcaacgcagggtggtgggctctcatgtgattctaaactgttcaagagagggtgggcgatgccatgtggaagctcctgagggaggtttgttttcgtcacatggacattatgagagcatgtgtttgtgctaatgggagtaacctggcagagagggaaaagctgatgtgtgggagggagagagagctcctgagggcggcccttaagtaggtgtgaagggaacaggatccattacacaaggggaggagctggctggaggcggagcatcgacggtggtcattccagaaggggatggcagcacatgcatgcagaggccaggtttggaggaaggatgcagacgcacagcacaatcaagtttaggaggagcaggtacacacacacacacacgtatataagcacatgcacatacagacatgtacacatacacatgcacatagacaacacatgcacacatgtacacgtatactcacctacatttacatacatgtatgcacacacatagacatatatgcatatagacatgcatagatgccacacacatacacacgcacatatacatacatgtccacacatataaacacatgcacatacacatacagccatatacacagagacacacatagacaccatagacacacccacacacatacacatgcatgtgcgcacacatacatgcacatatagacacgcacatgtatacatgtgcatacacacatgcacacgcctatatacacatatatacatgcccacctatacatacataaacatacacatatacatgtgcacacagaaacatggacatatacacacatgcacacatacacacaggtacatgctcatacatgcacatctacacactcacctatacacacacacacacacagcttttggtgccatgccgcagcacattcctagtgcttcacatatgttcctttctaattggtgtttgttttagaaggtggagtgagtacacgtgtctggatccagccttattagattgtctttgcgcactgggaataacacccactttatgctcagctcttactagtgtctccagctttccctctcctccttgttaacagaattggaacccttcctgtcttcccgtctctctcctgaaattagccaaggctctctctcttatgactcagttcattagagaagtaagcagaaacacagcagctgatgatgaacaaaatgtttccgggggtgaaggcacccatctggcagggggcagggcgctcttgcaggttccgccgtgcagagaagaagccacaaggaccgagggaggcctgaaggagatgtctaacctgagccgtagaacgtaagaagttgccagcataaagacaggtaggaaaggcatgtcagtgacagaggcaggagaacacgtgacccacttgtgtggggagctccagcagcgcgttcggagtgctgggcattgccaggtctgaaagaggtcatcagttcttgggaaaggtgcctgcgtgggctagaaatcatggaacaaatcataaagccaagtagtaatttaaacccagatgctactttaattaactcactttgctactttgccctcggcagcaagggttgagggcacagccctggctactagcacagccctggctactagcactgtcctggctacgagcacagccctggctactagcagagccctggctactagcactctcctggttactagcagagccctggctactagcacagccctggctactagcagagccctggctactagcacagccctggttactagcagagccctggctactagcacagccctggctactagcactgtcctggttacgagcacagccctggttactagcagagccctggttactagcacagccctggctactagcacagccctggctactagcactgtcctggttatgagcacagccctggttactagcacagccctggttactagcacagccctggttactagcacagccctggctactagcactgtcctggttacgagcacagccctggttactagcacagccctggttactagcacagccctggctactagcactatcctggttactagcacagccctggttactagcactatcctggctactagcacagccctggttactagcactgtcctggctactagcacagccctggttactagcactgtcctggctactagcacagccctggttactagcactgtcctggctactagcacagccctggttactagcacagccctggctactagcacagccctggctactagcactgtcctggttacgagcacagccctggttacgagcactgtcctggctactagcacagccctggctactagcacagccctggctactagcactgtcctggttactagcacagccctggttactagcacagccctggctactagcactgtcctggttacgagcacagccctggctactagcacagccctggctactagcactgtcctggttacgagcacagccctggctactagcactgtcctggttactagcacagccctggttactagcagagccctggctactagcactctcctggttacgagcacagccctggctactagcacagccctggctactagcactgtcctggctactagcactgtcctggctactagcactgtcctggctactagcactgtcctggctactagcactgtcctggctactagcacagccctggctactagcactgtcctggctactagcacagccctggttactagcactgtcctggctactagcactgtcctggttacgagcacagccctggctactagcactgtcctggctactagcacagccctggttactagcagagccctggttactagcagagccctggcttctagcagagccctggttactagcacagccttggttactagcacagtcctggctactagacacctctgctagagactgcccaaagaatatgccatgagttagctctttctccccctcctgccactggtcagctaagccttccccctaaaaatcactttttgatatagagggtgaagaatttccagtatctcctttagttgactgtgagagaaattagtgtaatttctaattgaccatcttcacagagttgtagaatgatcacagagcatttagaagctgtgggttgctaatagctaaatggctttgaaataatgaatgcttcatttgggggaactcggggtaactgtgacaaaccgttgttatgaaggggctttagctagccttggaagggcaggctggaggcttctgcacgtccttggaagtctccatccaccagaaggagctccttctgctctctcagcctggatgtgatagttgccagcaataggcgcaacttggtttttaaattaaaatctaatatttgatatacataattctatcaacaatatattaaaaatatgatttctgctttgcatctgctctttttggtacactgtgtgtcacatgatagatgccacattaatatctttgactattaatagagttggataagtaatacactgactcctttagcagcctcagcctttctttgaactttgcaaacatggccattgtaattaggtgttgttgaattgagaataaaagttactttaaggcagagctaaaagtgttaccgaggagatgctattttcagaaattacttggtaaagactcctctggagttgttagtaccgtatctcattataaagatgcctcttatatgtatttgagaagggaaagaaggagcccagtgttgacgttttatttagaaaatgtgaggccgggcgcggtggctcacgcctgtaatcccagcactttgggaggccaaggcgggtggatcacctgaggttgggagtttgagactagcctggccaacattggtgaaacccagtctctactaaaaatataaaattatccagacgtggtggcgcatacctgtaatcccagctacttgagaggctgaggcgggagaatcgcttgaacccaggaggtggaggttgcagtgagctgagatggtgccattgccctccagcctgggtgacaagagcaaacctccatctcaaaaaaaaaaaaaaaagtgcagtgcaggtgatccccaccgcccccacagcggtgctttctgcgggtgatccccaccgcccccacagcggtgctttctgcgggtgatccccaccgcccccacagcggtgctttctgcgggtgatccccaccgcccccacagcggtgctttctgcgggtgatccccaccgcccccacagcggtgctttctgcagggagcggacggcaggcctggggcgtgctgcccgcttacctcatgaactgcgcgtgcactgactccacattacccacacgtgggaacaatgcagcagatgtcttttttggatccggttgctgtgtatcgcatcgcaagacttttctggatccttcccaaatcctccagaagactctggagagcattggaagatgagagtctttcttgtgtttgagtccctaggctccccggagaaacccctttgggtgcacgctcaccttaggcttgctgtttgggaaaaccatggctctgggctggaattggtcacttttaggcctgggcactgttcacaagcttggccaatcacaagcactcagccttacacgcaggcctgtttctgaaagatagtttcaattacggggtcaatatcttaggtagatgcaaaaccaaaacagtgtataggaaataactcatctgttgaaatagtttttttttttcccttgggttagcaatcctgaagaacgttcattggcagaaccctttggcttgaatgtcaggatgttttttaaaaatgctaggttctgggtgggtgcggtgggtcaggcctgtaaccccagaacttcgggaggccgaggcaggcagctcacttgaggtcaggaattcgagaccagcctggccaacacggtgaaaccctgtctctactaaaatacaaaaattcgctgggtgtggtggcactcgcctgtgatcccagctactcaggaggctgagggaggtgaatcgcttgaacctggaggtggaggttgcagtgagccaagattgcgccactgcacgccagcctaggcgacaaagcaagactccctctcaaaaacaaaaacaaaacaaaacaaaacctgttggttctaatacccctaaagcaaagagctctcctgtgtactcgtccatgcacccagtagtgtggtgggaaagaaggaattcagcatgcttcctcctgggcctggcagacaggtaccaggtgagtggagcactgtcattgcctgtcacttgctgttggaacctctgcagccagagggcatgtcttcttgtctatacatcaacgtactttggggggcttcttaaataggtggggtttctgtcaatgatcacactgaatggggaaatgaagtttctagtaggcatatttgggataaagctctttctacatctacctgtccgactgctccctcggcaaccacagaatgcttccagtgtccagtgtgctccaggaggcattgggccaagcgcccgtgcatctcagggtgcaggctgagataggcacggcagatgcaaacccagcagcgtctggaccacgggagctttgtctctccaccggacaagacacagacttcttggtccctaaggaagtccccttcaaacctgctgagttctcatgtggctcctgtacactggagactcgccccaccaccccatgccatcctatgttctagtgctgacttggaagaaaggtgggttggtatgaaaagtgttagatttcagaagcttggcacaaatggttggcagcgatggagggactgcagtgtttagaggccatggtgggaggacctgttggatggagggactgcagtgtttggaggccgtggcgggaggacctgttgggtggatggagggactgcggtgtgtgtttagaggccgtggcgggaggacctgttgggtggatggagggactgcggtgtgtgtttagaggccgtggcgggaggacctgttgggtggatggagggactgcggtgtgtgtttagaggccgtggcgtgaggacctgttgggtggatggaggggctgcggtgtgtgtttggaggccgtggcgggagggcctgttgggtggatggaggggctgcggtgtgtgtttggaggccgtggcgggagggcctgttgggtggatgggggggctgcggtgtgtgtttggaggccgtggcgggagggcctgttgggtggatgggggggctgcggtgtgtgtttggaggccgtggcgggagggcctgttgggtggatgggggggctgcggtgtgtgtttggaggccgtggcgggagggcctgttgggtggatgggggggctgcggtgtgtgtttggaagccttggcgggagggcctgttggatggagggactgcggtgtgtgtttagaggccatggcgggaggacctgttgggtggatggaggggctgcggtgtgtgtttggaggccgtggcgggaggacctgttggatggagggactgtggtgtgtgtttagaggccgtggcgagaggacctgttgggtggatggagggactgcggtgtgtgtttagaggctgtggcgggaggacctgttgggtggatggaggggctgcggtgtgtgtttggaggccgtggcgggaggacctgttgggtggatggaggggctgcggtgtgtgtttagaggccgtggcgggaggacctgttgggtggatggaggggctgcggtgtgtgtttggaggccgtggcgggaggacctgttgggtggatggaggggctgcggtgtgtgtttggaggccgtggcgggagggcctgttgggtggatggaggggctgcggtgtgtgtttggaggccgtggcgggagggcctgttgggtggatggaggggctgcggtgtgtgtttggaggccgtggcgggaggacctgttggatggagggactgcggtgtgtgtttagaggccgtggcaagaggacctgttgggtggatggaggggctgcggtgtgtgtttggaggccgtggcgggagggcctgttgggtggatggaggggctgcggtgtgtgtttggaggccgtggcgggaggacctgttggatggagggactgcggtgtgagtttagaggccgtggcaggaggacctgttgggtggatggaggggctgcggtgtgtgtttggaggctgtggcgggagggcctgttgggtggatggaggggctgcggtgtgtgtttggaggccgtggcgggaggacctgttggatggagggactgcggtgtgtgtttagacgccgtggcgggaggacctgttgggtggatggaggggctgcggggtgtgtttagaggccgtggcgggaggacctgttgggtggatggaggggctgcggtgtgtgtttggaggccgtggcgggaggacctgttgggtggatggaggggctgcggtgtgtgtttggaggctgtggcgggaggacctgttgggtggatggaggggctgcggtgtgtgtttggaggctgtggcgggagagcctgctgctcagttctcaggactggttagaaagtaaatttaacgtaggagcaacttaacaaaaagaaaagcttttcattttgggggctttttttgtttgtctttagagatggctttgctctgtcacccaggctggagtgcagtggtgccaccacagctcactgccaccttgaactcctgagcccaagggatcctcccacctcggcctcctgagtagctgggactgcaggcatgcaccactacaccaggctgattttaaacaactttttgtagagacaggggtcttgccatattgcccaggctggtctcaaactccagagctcaagcaatcctcacacctcagcctcttgagaagccaggactacaggcatgcaccaccacacctggctaattaaaaaaaaattttggagtgatggggtctttccatcttgcccaggctgatcttgaactcctgggttcaagtgatcctcccacctcagcctcccaaagtgctggtattacagatgtgagccaccacacctggttatataaaaagaaaacctaaaactagtaaaccacactgatattttttgctatatttctgctatatacatgtccttttgaaaaggaaaataggaatattgaacttagtttttgcgtaaagggccatttcctcccacttaaagttgtttcctttttaatcctctgccagccattcttacgtggccagtggtagtggtgctgattaaaataacacaagtctgccagcagtcccagacagacatcgcaaatggcgccttccacagttcaggactgtgtgcttcactccacggaggtctgcctcagatgcctccctcccagcccctttccggaggccagggagagtgcgtttccaccaagcgcaggagtcagcacttcctcatagccttcccgtgccctcccagcaccaggcacacatggccgctcccacctatcccatccacctgttgtgacgcgggtctgagtagctgcaggtccacgtcgttcctggacccatcatctggcttagtgggcctgtcacagcagacctggaaactaattttctgtgtacagcaggttgcattgccgatgctattttagcttatggagcccagagcccaggaaatggttttaaacatgattttgccttccctcttccctcttgtttaaaaaaacccactccttggtggttcttggtgattgttgcgtggcatgtaaatatccctaatgtcaccgaactgtacatttgaaacagttaacatggcaaattttatgctacaggtaatttatcatcataaaaaaaacctcattcctctagaaattgcagtttttattgaaaaagttaaattatatttattattaagtatatgagaatttgatttgtactctgggtttaatgttcctgtggtagaatgggttattaataaaactagcagtcattagtaccttccagctgagaaatttgagatgttaaaaacaaagtttgtcagagtcagatgacagtgcgttctgtaccatcaccgtggtgcgaggtggctgtgagtgaatacagctctgtgtgtatttcattccgaaagcactgggcgtgctgtctggagagggctcggcagctttcgtgttggcgtcgtaggtgcttggtggagattcagaaggacccagatgggataatggggcaaaagcagccctaaaatcaggggcagtgcccggcactctggacgcatgtgctggcccagctgcagggcagtccgtgtcatctttggggactctgtgtcctcgtcgtcacagctcttttaacatggagctgaaacctcatggggttggtaaaaagcagatgaaatagtatatgtgaagagccgtgagaaatactaagaactacgcaactaaaagtaaggagcaaggaaggagcaaaaatgcagacacagacacattctctccccgtcaagccggggagcgcatcgcagccctcggtgattaaaagccacacactctggacacatctcacccccacccatattcatcgtcacttacaatattcatttacaatagcgcctcctcttcatggaggcctgccacagtctgagtaaacaaaagtgatcttgtccctgtggtattcacaaaacaagccctaggaattgtgtaagtcacaaacagcgtccaggccctggatctgggacgaccagtctctgtcatgcgatgctccagccctcatgctgaccgcttggtccacgaccccgcattagcaggtggcgctctcagtctgaagcctcattctgtaccttgttgttccacatccccagcctagatgggcagatgaggttggcccctacagcagaatgctttccattacagccgaattataggtatttgtagacacgtgaatgaaggagttctgcaagctgtgtggcccggtatgatcggcatttttggggttttctgttttcattcctttagctatctacatgacatgcccaggcatcacatttcagggtaactgaagagaaggcaatgcagattccatctcacagcctgtggtgtgttcttcttgttttgtctgttccctgtctctttctgtccctttgtttcctgctaccctttcccctctcccctctccccacaacaaaggaccagccttgatgatagtgcaggagggactttgcaagccaagctctcccagggcccatggggcctcccttccagcaggtgggccctgcatgcagcccacagtgtctgaggactctgcatccccggaagggaggcattgcttgtgcgcagctgctgtgcctcccccagctgaaagcattctgtttggtggaactggttctgatattttccagctcttctcaattatttccaggagcaggcagagcagtgtgtgtacataatccctcatgtgttatacttattaaattttactggccaaaatgccaggaattcttgtgaacttcattatttctgaaaacgacagcaaaacctcttgtggattaccgaaatggccacatgcaggcaacgtaggtagccagggaaaggaatcacaatctcagtgctagtataattagtccttggtggtataaggatcctgttttgttgaatgctgtggttttttggtaaaacaggaacccacctggtatccatggcagggtatagcaaactcgtgtatcagacagtcctgtcattttttaaacctttgaatgtaatgcattatttaaaaagaaggaagagttacactttcagttagatttcatttggtaaaaagtgaaattttctgtgcattttagtagtaaacaacaattcacttagtgcctttcttcctaaaatggcactgtgatatcagcttcacatatgatacttttacgtgacaagtctcattgaaataaataccaaccggcattactatccctactttaaagagagattaaattttgaattcaaaaacacctcacctttctccctgattacaaaattaatgcacatttgtttgtagaacatttagagaaatccgatgaagatgggaggagataaaatccccctaatcccccactcggggatgagtgctcgctctgtctgtttttcagtctcttttgatgggtcgctttagtcagcccactcaaactcacattttgtggtttgcctttgtgttggtgatggagttcacatcatataacctgaacgtcttcccatgtcattaaacacaacaaaataaggttaggatagattaagattgaacgtttaggccgggcgcggtggctcacgcctgtaatcccagcactttgggaggccgagacgggcggatcacgaggtcaggagatcgagaccatcctggctaacacggtgaaaccccgtctctactaaaaatacaaaaattagccgggcatggtggcgtgcgcctgtagtcccagctactcgggaggctgaggcaggagaatggcgtgaacccgggaggcggagcttgcagtgagtcgagatcgcgccactgcactccagcctgggcgacagagcgaaactccgtctcaaaaaaaaaaaaaaaaaaaagattgaacgtttaaaacaaaccgtaagacaccatgaaagacctggtggacagtgatacaatcctggggtaagtagggtcctgcaaagaggaaaaccgggaagaaaacagagttgacagagacacaaccaggctgtgccatcagaagggccttgggaatgagacggccaggtttccaggcttacagtctgtctctggagacagttcagcagcgacgcctctctccagaggactttccagtgaaaactcacagcctgagttgatttattctttccttctgtgttacagctgcagcttactatttggttgtgaccagcagctaaatcacactctcttttcccgaatgttctgcccttcaggtagctgcaatcaacccaaatcaccctcttgctcagatgcctttgcctccgtcgatgaaaaactgcatccagctggcagcctgcgaggccaccgagctgctgcccatgatccccgacctcccggctgacctattcacctcctgcctcaccacccccatcaagatcgccctgcgctggtgagtggcccctgctgtgcccctgggacccactcaactgggctctcccgcagggaccccaacccatgtgggccccaggcattcacctggtcccaggagcccacgtgacagacatgagtgtccccgccttctttttgtgtcattcgggattccaggtggaggtttgggttctactctttgagagctcaagatccttcttccttctgatctgttcgtgggcagctcactgctttgcgatttccaagaacaccctctccttacctttgttcactgcggaggcgtcttagtaccaggataggtcatactggaaactggactttctttcaggggaagaaaaggctgttatgaaaaaggaagtcatttaattccttgcttgagttgaagcgtaatctttcaatgtatttttagcaatgaaaaaagagccatgatttttctgtctccatcctttttaagttatagccgtcgggaacataactgaagaaatgtgtgtgatattccaagatggtagaagccgcatttcagccccaacatccccagcagaacgcacagtgggatatgtgtgtttcctgcctccaaatccaatattctcccctagaccatcttgccagtctttaatatctcctttcccattttatgttttgctgaaaagcttatatgtcgtggctgttaccggctagtagataaatacctctcccttgaggtgccgtgcgaatggtgcagctgtgcagcagacaccgtgctgtcggccgaggacactcttgaggcttctgtcaagatggcctaacactctagacaagtctcctgccttctcacccacagccctgggcggacacggggagctaacagcacagcaaagtaagggcccccagggacaccctgggaggggccagaggggcagggcagcctgaggggggaggaaaacttggccttcctgctctgcctctgcagccaagtccaaattgatcccagaccccagggctgggggttcatgatgttggggtgactgcagcgcagccctcacattaactgtccctaggcctccccaccaaacttgagggctacaggtttccattcagggagagacctccttttagtgttactcaccccaaaatagttggagatgaagggaagagggctgggtgtggtagctcacacctgtaatcctagcactttaggaggctgaggcaggaggatcccttgagcgcgggagttttgagaccagcctgggcaacatagggagaccttgtctctaaaaagaaaatagaaaaatagcaagtgcagtggctcatgcctgtaaccctaatgctttgggaaggtgaggcaggcagattgcttgaggccaggagttcgagactagcctggccaacatggcgaaaccctgtctatactaaaaatacaaaaaaattagctggatgtggtagcacatgcctatattcccagccacttaggaggctgaggtactagaattgctcgaacctgggaggcagaggttgcagtgagccaagattgtgccagtgtactccagcctgggtgacggagcaagaccctgtctcaaaaaaaaaaaaaaaaaaaagaaacaaaaaaagaggggagaggagctgtctggagggggcagcagagagggatctgcagtgtttctgctgtccagccagtacccccaccttacctggctgatgcagacttagcctgaaagggccactgtcctctgcacccagcggagcagagctcacttggcaaaactagacacctgagtagcacagccactacgcagagagaaagctgaaccagggttattgtaaaacaagtgtaatacatacaatcaaagaaataaaggaagacacctgtaacaagatgtgagaacaatgctacagttttaatgccttcccccaaatgtatgtgctggaaacttaatcccccacgcaacagtgttgggaggtgattgcatcatgagggctctgccctcacatttaggttaatgtcactgtcacaggggtaggttagttatgtgagagcaggttgtgataaaagcaagcccagccccttgtgttatcttgcccttccaccttctgccatgggatggcacagcaagaaggtccttgccagatgccactctttgaccttggacctcccagtctccagaactgtaagaaagaagtttctttacttagatgaagagaagctgcttgaaaagtccaagaatacagttaagtaggaggaataagttatagtattccatagtagagtagggagattacggttaacagaaataatttattggatatttcaaaatagcttggagagaagaattgtaatggccccaacacaaaagatagaaggtggagtgagatggtggaatagaagcctccaccagtcttcctgcagcaaggataccaatgtaacaactatcagcacacacagaaagcaccttcatacgaaccaaaaattaggtgagcgctcatagtacccagtttagcttcatgttgctgaaagaggcactgagaggtagaaaaaacagtcttgaaaagataaatgtttgaggtgatgtatgagttggatagatcccagttaccctgatttgatcattacgcattgtatgcacggatcaaaatatcacatggagccccaaaatacatacaactatcatatatcaatttaaagaatacaaaaaaaatttgttataaattactcagtctgtcgtagtctattatagcaacacaaaacagacagacagacaagaaaaagtactataaaagaagaacaaagcagaaataggggtaggtgcactgtaatgtttgaaataaagaacacagtagacaggacccatagcaggagagacactgctggagccaaatgaatggcctggaagactacagtgggggctcacaggaggccatgggaaagggtcgagatgggaaacagaaaagccaggagatgcagagaagggaaatagaggccccagtatgcagactgggggcatcccgtgttgagagaacaagaatatggcagagctgaaaatacctgaagatctcggaaatgcactccccaaaattgggaaagctggaagccctccaactgagagggcttgtgccaaccagaaattaatgggagacctccgacctcagcacatccagtgaggcggaagaccctcttgagggcaccttccctgacgccacgttgtttctgaactgctctccatccttgtttgtttgctctgtaatgtcgaagtcctttctgaacgcagatctcttttcacgtaccagtttatgaggcacacgttacagtgtgcctacctctatttctgcttgtttctcctttcgcattactttctcttgtttgtcttaatctgttttgggttactataacagaatacaacagactgggtaatttaaaatgacaattttttgtattctgtaaattgatatatcatagttgtccatatttggggggtccatgcaatattttgatacctgtatacgatgcattaatgatcaaattggggtaactgggatatccatcacctgaaacatttatcttttctttttaagactgctgaagagacggtcttttggggcctctgtttctcttctctgcatctcctggcttttctgtttcccacctctgtcctttcccacggcctcctatgcgcccctcattgtagtcttccaggatattgtagggcttcagcagcctctcacctttatgagtgttctttttaactctctgtactgtatgtctgatccctgtccaaagaggcttatgagtgcccatttcacgttaccccaggaagagattggtccacctgactcaggagttcatccattcattgcccaaaaactaatttattcagtcccgactgtgtatgtaataagacccatgctaatcactataggagatcctaagaagcatattgccctcaacaaatgtctcctctggttgaggagataagatgtggcttgaaaattcatgatttcaatggatgcttcatgcaagatgaaaatctgaacccttcaaggcaatgtgtgatcaaagaccaagtgaccttatggcaccaagggctgttgtgttcccagaggacagagaaccatggctaagggccacagggtttgagaaagctgcttggaggaggtggaacctgagaggaaggtttcgtcaggagtgcggttgagctcagagagtggactgaagtccaagtccattgtggggtgctttgaatgctgcccagaggaccttgacttctcctgggactctggcacaagagagcccctgaagctgtttgggtagaaaaatgacttcatcagaaccgtgttttagaaagaggatccaagtgatgatagggagaccttggtgaccattaggccattatcatatcagtgcggtcttgagctggtaaaagattagggcagaaagatagaaaatcacccaggggcctgtaggctggagcttctgtagacgcacagtggacactgccgagaaacaggcctcatttctcccatgttcccgtccccgctcccggtttcctgcatgactgctttggtgccccctgactccagaatcaacaccacaccagctctgcctttagactctgcccagaggctctgggctggatactgtatttggtgcgaccctctggggcatttttgcaagttttcaggcagatgggtgggggagcagtgaaggaaggaggaaaaaagacaaagcacaaggggaaccggaaatgacatcgctaccttcctgtgccttccctgccgccccactccagctacctgtcactaaacccagtgcacttcatctagttgacgggtttctctcaggcattttgtttttctgccatgagtgggaaggacttggcttccctccgcgcacagctgtgcactcccaaagacgcctgggccagatgtggcagtgcgtcctgtagtcccagctgcttggaaggccgaggcaggaggatcacttgagcccagaagtttgagaccagccctgggaacacagggaaaccccatctgtaaaaaaaagtaaaataaagaagtatgctttcactctgagggctgctggcctcgttatttctaaaatgggtgcctgccctctgagtagggaatgtgctttctctctaccaaggcatgatgtgtcatcccagtagcccctgaaatccttgtaggagttaggacatagtcagatttttaaaagtaagcatttagtaggaagtgcagtgaaaaacaaactgatacagttaccataagagggactttgaaatcaatatgccacagtggcagacagtggtcatcagataaccactgcctggaacaattgagcggtgtctcaggtggcggctcttttacaataaactgctttctcccatattgaagtgctgaaattaggttgaacatgacattttgctaggtgtctatggcctgtgagtggtaatggactatattcattaaagaattatcaagtgaaatgtgtagttttgtgtgagctaagttaaaaaccaccagggtttttttttttaatggaagagtgagatagtttgtcagacagtaattacgtatgtttttagggttttagttttattttttcattttgaaaagtcaatttttctaattaaaaatgaaagatacattcttttcagaaaattactaaaaagttaaaagtagaaaaaaatcatccaagattttaccatctaaggacaactagtgttcactttttgatgtattgcctgttggtcttttttctgtgcatgtacattttgcactgatgtaagtggacagaatttacgatttcatatccttaacccttcgcattatactagagttccctgccctagatcattagagactcttagtaagtatcattttatatttcactatgttgaagttccatgttttatttagccggagcgtagggctttgggatttaggcgccaggagtatgcgggtgggaaggttcagcctggcactctgatgggagtcggcagacctggttctgtgaaggggcagacgcacttgggttaggcttttcgggccacacagtcccaagtctgctgttgcagcacgaaagagccacaggcaatatataaacaaatgagcatggctgtgttccagtcgagctttcttttttcttttttcttttttttttttttgagaccgagtctcactgttgcccaggctggagtgcagtggcgtgatctcggctcactgcaacctccacctcctcggttcaagcgattctcctgcctcagcctcccgagtagctgggattacaggtgcccaccaccacgcctggctaatttttgtatttttagtagagatgagattttaccatgttggccaggctggcatcaaactcctgacctcaggtgatccgcccgcctcagccttccaaagtgctgagattacaggcacgagccaccgcacccagcctcagtcaagctttctttaaggaaacaggcagttggccagatttggcccaggagctatagcttggcacttcctgctccagaaaagggaactaggattgggctgcagatgacggctgtgcgtgtctgccggtctgcaggtgacctggagaagggcgatgctcgggaaggtggattccctccctccctccctttactatgtaaataagagaaacggtttctaagcacgctgccctcattatgctggcacagctgctacagaatgcggtgtgctgggtaaacaacatacagctttgcttcatttggacaaaatgtgtacatgtgtacttggtggcaagcgtatttatgaatcttatttgatgatgaacttgttggaagacattgttctctaattttttttcatttttgcctgtctttttcatttttggaaactgatttcaataattccaaaatgagcaatgacattactttccacataaatgattatcttactcaccatatacatcaatacactgtaagaatccaaaatatattttttcccttggctgttttctacttctttgattgagtggcataatatcattttagatttattacgcgtctatttgtatactactgaaaattataacccagtgggacttcatttgctgtgggacttgctataaaacagattgatgtctattgcactgtgctgcatgcactagtattgtctattaatgaaaatgataaacattattttggattgaatagaggtcaaaaaacttacttcctttctttcaattaagttgaaggatttccaggactataaatgttaatgatagagcattaacgtgtatttgtcagcgtggaaagtttcgctcctgcattgcccgcaggagacggaagatgcatgggtttcctggcgcgcaggttgggtggaggctcagcgtggctctgtctggccaggctaagtggtttgcagtgcctgtctcatttcagacatttgctgtgacatttgcttcgtattttttcctgatgactcaaccaagaatcattcagaattacctttagaaacataaattcttgtggttttgatgatagagttaaccatgtgttctccaaggagtcttctaaaatacatctgctttgccagagaacacactttcttctgcccgttcagtgctctcgggtcttttgccgcttcctttcaacaacagtccgatgactttgtcttcctgcatatgtgcgaagggagaggagctcactggtcctcccagagggtgaagtaaccgggacacattattgaataaaatgctcttttgtagtatcccactctgtatcttagaccttagtcgtaggcaagtttaatttggaatttgcgtctggagaaacggctttatgacgtttccaagtagagcctcagtatcatggatctcacacagtccccgcggcagcttccaggccgtttccagaggaaaatattttttctccccaaacaagacagtgttctctcactgttccagtctcttgacatatactcaattaagatgaatatcataatgtattgtaatagagctcccgttttaaaagatgacgtgtaaaaaccacctgatggatgcggtaagaaagggaattgaagcagatggaggggcacgggctgctgactccccggctgaaccccgtcctcgggtgctgcaggaaagagtgagattgatgatcctggagggagcccactcagcagcacagccggagactttgctggtcccttgagatggctgagtccccactgggggctggggtgaggggtgaggccggaggagacagtggagctggcgagggccccagggtgcaggcaaggctgagggcactcggctctcctcccactgcccttgataggcatggcctgctgtgctgtgtctggggctcagaaagatggaaaataagagggtggaaagaaagagtttgtcctaccgcccttgtgaaaagagaagtaatccaataataaataaaagtgataaaagacaattggaaatatgaagaagaaacaggaagaaagaccagttggaagcattaagtataaaaaatataattggtgaaataattgaagagatggattgaaaagcaacattatggatagagccaagaataaaccaggaagctgagaagcttgtttgaggagttcccaccaaagggatggagctagaaggaaggggagaaacatgagaggcagagacaaagtttaaatatctaggaaataacattttcttctctctaaaaaaaaacgtagaaaaggagaaaagacaggcttagtaaatagaaagtgtgagatacgatggctaaaatgttttgaaataaagttgtaactgtaaacgaattgaattcacctctcaaagggccatgattcttgtgttggttaaaatcatgatacagcagtctcttgtccatgagacacagatttaaagcaaaacgtttaagcctgggcaaaacagcacgaccctgtctctactaaaaatttaaaaattagctggacatggtggcttatgcctgtggtctcagttcctcgggaggctgaggcaggaggatcagttgagcccaggagttcaaggctgcagtgagctgtgattgtgccactgcactccagcctgggtgacagggtaagacccagtctctaaaaaaaaataataataataaaaaataagaacatgtatttcaaaggttggaaatcagaagatgaaaaagagaaatacgagctaaaagaaagctggggtggccagtcccaatatgacttaaagcagaagctgagataaattattgagaggggcaaagaaaaatgttgtattgtggtaaaacgaacaggaaagcaggaaggtatatactgatgatgactgtgtgcacctgacaacgtggcctcgaacgagataagatgggagctgaagtgtggatggaagcagatgaatgagaagtgtgcttagatacagagacaccaagtacagacaaaggaagcaacgtaaatacgacttttgtcaccgaattaattagccagacctcacagaggcacacaggaccatacatccaacagggaatgtggacatatgtggaccattcacaaaaataaatcatgcgcccgactacaaagaaagctttactaatccggaagaatcagcatcgtgtgaactccgtggcagaccacacgcaatgaagctagaactcagtaacgaaaggacagctttaacaaaagtctgaaaactaaaatcttaaaatccttggattaaagaggaaatattttatattttttatttttttttacatgtacacacttacacatttatttgacttcattgtagaactttgacattaatcccaataactaatctctttatacatattgtttcatcctgacatcaacctgaacagggaaaattgacttatataagcacatagctactatagatgtctttttagaaactgattattgatatatagcagagaaacctaaaatctctttaactaacttgaagtcctgaccgtatgacttcttttgttattttattttattttattttattttattttattttattttattttattttattttattattatacttttaagttttagggtacatgtgcacaatgtgcaggttacatatgtatacatgtgacatgctggtgtgctgcacccattaactcgtcatttagcattaggtatatctcctaatgctatccctcccccctccccccaccccacaacaggcccagagtgtgatgttccccttcctgtgtccatgtgttctcattgttcagttcccacctatgagtgagaacatgcagtgtttggttttttgtccttgcaatagtttactgagaatgatgatttccaatttcatccatgtccctacaaaggacatgaactcatcattttttatggccgcatagtattccatggtgtatatgtgccacattttcttaatccagtctatcattgttggacatttgggttggttccaagtctttgctattgtgaatagtgccacagtaaacatacgtgtgcatgtgtctttatagcagcatgatttatagtcctttgagtatatacccagtaatgggatggctgggtcaaatggtatttctagttctagatccctgaggaatcgccacactgacttccacaatggttgaactagtttacagtcccaccaacagtgtaaaagtgttcctgtttctccacatcctctccagcacctgttgtttcctgactttttaacgattgccattctaactggtgtgagatggtatctcattgtggttttgatttgcatttctaaagaggaaatactttaaaactgataaaatactcacagccaaatgttagtaatagcacatttgctgtttgtggggtgtatgtagccaaagcaggcgaggatttaatacatttagtcagaaaacaaagattaaaaaaacaagaaaaattaaatgtttgccttaaagagccaggggaaaaatgcaataaacagatgaaaaacaaaatgaagagagcgaatctgaaagatacaggcagccctacgctgtccgtcgcatctctgcatccatagggtctctgcttcatttcctgggagtcctgccagtgtgggagggggcgtccagggcctctgaacactcttctcacagattttcatctgggcacttgctctcagttcttcttttcagagagccagttgtctcagttcttgatacttgctgacagcaggctttgggaggtgagtgcttcattttgactttgcaccgtccaggtcaaaggcttcacttctctcacctctgctgagccacttacgcttgtccaactgtttcttaacgtttggttgacattttacagttacagggataacagtagctagcatttgtcgagcgtcactggagccattccactaatgcactcatctaacaccacacgcctgtaaggtttggactggcgttagtgctgctttcaggatgaggaagttcaggttgcttggagagtagctggtggagtcaggattcaaagctgggtgcccaggctcccgaactgacagcctcaactctgttgttccgcctctctctctcctgcccagcgtctctcatttgccatgatttccttcctggggctctccgtccttgtcctgttctttttctctcgttatggaggaagttgagatcactatcatctatagtctgtcacgtctaaatagaggttaccacgacttacttaacgtggtaaaggctacatcagagctcttcagcaaaccagcctagtggggagactggagacgtcttcccttcgaagctgggaacaaggcaaagattctctctcgcactaaaacagtattagaattcctgacccccagtaagataactccataaccagcagaaggaatgtgaacatttgtaattatctgtttacagtaagggccatctaacatagttcactgattctagcatgtactttttaaattttttttaagacgtgatcttgctttgtcacccaggctggagtgcagtggtgtgaacacggcccaccgtagtctcaacttctcgggctcaagcaatccccccacctcagccccccaggtaactgggactacaggtgtatgccaccattctgactaatttttgtatcttttgtagagactgtgtcaccatgttgcccaggctggtctcgaactcctaagctcaagagatcctcccacctcagccttacaaagtgctggaattacaagcatgaggcaccatgtctggtccttttttaaaaaatagagacagggtctctcccttttacttagatgggagtgcagtgacacagtcatagctcactgcatccttgaactcctgggctcaagtgatcctcctgctttagcctcccaaagtgctggaattccaggcatgagccaccacgcctgatcccagcatgtgcgttttcacacttaacatatctggggtccagaagcatcttacaataagtaacatacctgtttagttggcagttcttttcctttgttaatagtgtatagaaatgcttgcaaaggtccacctagaggtgtgcactgtaccctttcttactgctgtttgtaagctcactgtttgtcactagggaaagaaacaggcaccattacttaactaggtgttcatgtaccggcaataattgatctcaaaatttaatgctatttgtagtttttaattaaaaaactctcaaatgtatggtctaagtttttctttaagtccagaaaaaaaagaatacattaaaccctaagtaagtagaagaaaagaaataataaagagaagagcaaaaataaacagaagttgaccccaaaatttgtaaaaattcatgaaactagttgatagtttttgaaaggttcattaaaattgtcaaaactttttctagagtgctcaagaaaaatagaaggaagatacaaatgactttcatcagaaatgaaagagggcacatccttactgatcctacagatgttaaaagaataaggggccaggtgcgggggctcatgcctataatcccagcactttgggaggccgaggcaggtggatcgcttgagcccaggagttcaagaccagcctgggcaacatagcaaaaccccatctctacaaaatataaaaattactcgtgcgtggtggcatacgcttgtagtcccagctacttgggaggctgaggtgggaggatcactgggaggcattgaggctgtagtgagcagtgcagtgatcacgtcactgtggtccagcatagaccacagagtgagaccctgtctccaaaaatgaaaattataagtaaataaaaggagaataagggaatcattttaatcatgaaggaccatatgccagtaaattcttcatcttagatgcaatggataaattctgtgaaagacacaagttatcaaatctgacagaagaataaaaagaaaatttggataggatatatctgttaagtaaattaaatttctggttaacaaccattcaaagacaaccccgcacccagatatctttactagtgaattttaccaaacctttaagatgaacagaatagacagacaacctttgtgaaatgtttaaatatctgctgaccatattaagttgctgtcccaaggctcggtgtaattagtaatggtaaaagctaagaaaatctttacaaggttactgcctaactgttgactaatttgaccaaattttatgcacctggggccttttacaaatcagcttacttccctaagaaaaagtgttacttgaattttttttttatgattttattttattttattatttttgagacagagtcttgctgtgtcgccaggctggagtgcagtggtgcaatctcagctcactgcaacctctgactccctgtttcaagtgattctcctgcctcagccttctgagtagctgggattacaggcacgtaacaccatgcctggctaatttttgtatttttagtagagatggggtttcaccatgttagccaggatggtctcgatttccagacctcgtgatccgcccgcctcggcctcccaaagtgctgggattacaggcgtgagccaccgcgcctgaccacgtgaatttttttttaagagcagcttgcctttatatttttggttcacgttgggacttaccttctagtcatttactgttggctcacatttcctcttctcccatgtctgtctaacgggagaaccatggagtgcgtgatctcacttggggtctcagtaggccgcttagtgagtcccaaagacttttgtgagagtttgaatgcatccgtgtgtaatgtatctggaggactcaagggtagcaagtatacacagagtatccttttaacataaaaggagcattcagaaaagaattaagactgtgcagttcagcccacagttgggctctcatagctactgagttattcatgtaatcctcggaaatcagcttgggtgaaatactgcacgggaaagagtgctcagccccggcctcactcctgcctgtcccaggcctcctcactgtccgtgtctcatgggaagaaagtcatttgttgtctcctgcttgatgtcatcatcactatgttccagattagcttcaggacttgtttgaaatcatacctactaatcgactgacttatatccccatcacacggtgacatattaactgcttatttgcctctttgtatcttcttcttaaacttctgggcattttagtggcagtttggcttcttgtttgatttatgtgcctaagcgtgctcatgcctccatatttaatcagtgacgttaggtcacattgcatgcaaaaactgtcagtgcattcagctccgtatttaatagcaggcattcatgacccttttttaaataaaaaagcgatcatttgatttgtgctaaactggacagtatattgcggaagccattttcatcctcattttacttgtgctgagatcgaatcgataatgcctcttgatggcatcattgttggaacgccagaaccgtgctgtcacatagacctgtatggagggtggcatgtgtcccacgccagagccatgccatcatgtaggcctgtgtggagggtggcatggtgtcccacgccagaaccaagctggcaagtagacccataaggatggtggcatggtgttgccagccttgttgtaaaatggtgtgaattaatccaggagacgttagcctcttctttggtttctcgttatttgtactgctaagtaaatgttgtatatgtatgttcagtacatagaacaatttaaactggattcagaagccatttcagtgcactctgagactgggcattaaaccttgctttaagtactgtcaccacagtcactgagaacagcccgagtgctgcttacttgcaggttgaaaggactctgtgcaatgagaacttctgagttcccatcctgtcccaggtagccagtaaacacctaagtcatgaaggttatgagacacagtccctgtgtgcccggaaaagagggtctccagggagaggtgctccctctcatcagtgctcttcttggagacagaggagggagtagggatactccttctgcttgccttggaggcagaggcggcatcactgctgttggggtgtcctcgtatcacccgctatgatgagtgaaatttcaccagcaagaggaggtggagaaaggcattgtgaggcactcaccctgacctgctcagaggcctgaacgcatctcgaccagcagcccagtgtggcatctgagtgaaggatggtggccaggacacgagagggagggcggggtccgtgaccatgaagctcgagctggaatttcttctgttggcagtgccttctttgtggtaggtgctgtgcagctgcagggctggcctggcctgcagagccagtcacacgggggtctccacccttgtctcagcccactagtgctgctgcacaggcccctgaaacagggtaatttataaagaacagagttatttctcccggttctggaggctggaagtcccaggtcaaggcatcggtgggtttggcgtctggtgagggctgttctctgcattcgaggtggcgtcttttcccgtgtcctcctgggaggactgctgcatcctcacatagcagaaggcagaaggcagcagaggctatgttcctccagcacccccgccttaaataaggttgctaaaatcccactcaggatggcggagccttgggatgtaaccgtcatctaaagcccacctcttagcactgtcacttcgggtcctcagatccaacaggaattttaggagggacgtgccttctcagcgtagcagccctctgggaaatgaaagcctgtttgagaagacatgttcgtatctcagcagcagcgtggtccgggctctcctgaggaaggtgcccagggcatttggggacacagaggagcaaatttcatccagcaggggcagctcactgtgtgggtgaggcttagaactgggcatggcggtggctgtcggatggacatgcaggttcaggatccaggtatgtctgtcacctaccatttctaatggaggacaacgatatcatcagttgtgaacacatcttctctgttactgttcaagaagccatgctgtttgcattctctaagaggaaaatcgcactgctggtagcaccttcaacctgcaattcctacttacccgcctcaaacgcttcctgtcttcacttttgctgtccgcaagatccccaccttccaatccacaaatgtttgtactcaaatttccccagcagaaccagcaataaagcacagaaagcagctgacctaagcccacccacctctttccttaaatcgggcatcttccccttagacagagtgtctggtttgcgctgctgtcaccactcagcttctcccagcatacagcgtgtgctgcctctcctggcccggggcagtcccctgccttcctgccattccagcagctctcccggaaccatcgaggtgatcgctgccttctgagccgtcagcctcactggcctgtccctaatccttgcccctgaagagtccgctgcagagctgaagcaagggacacccccttcagcacctccttccctgccctggggtctgcggctgcctctctgaagctcccactctctggccagcctctcttcctgcacttggacgtatgttctcccacggctgtgttcttggccctcctcttgacgtacttctgcctgtgagaaactgcagctcatccagcgatcactatcctgacccctctgagataatccctccttcctcacgctctccctctgccagcgctttcctcgtcatatacacctgcataaacctctcatgcctgaaacaaaaggtccaccccagcaagagggcactcccgccgcccgctggccctcctgggcctcattgcctagttctttctctccaggtgcagttaagcttcaggacggaagggggtacctcccaagcctttctgcccttcctgtccagccctcaatattgtaatcaggtctcctcaacctagaacgccccctctccttcccagccccaggtgtttaccctggttgtttgtgtttcttgtttttctgtgtaatggaaggaaggtatcacctgagaggccttaggaatgacacaggaaaccctgctgcctccattcagacttgggtggggtgggggtgggtggaggccagctggcatctcccaggatttctgaaccctcgtgtccctcagccagccaccgccatgcccagctccaggcctcgcccccgatatgggggaagctgttgctgctggatctgacgtgcccgtcttctcgctcgggcaccccagctggtgcgtagcgaggcagtcacagctcactgcagcctcgacctcctaggctcaagtgatcctcccacctcagcctccctggtaactgggtctataggtgcacaccaccatgcctggctaatttttcacattttttgtagaaatggggtcttgttatattggccaggctggtctttaacttctggcctcaagcagtcctccaactgcagcctcccaaagtgctgggattacaggcctgacactaatttctgcacatagaggtgaggaggcacctcgggtatcagggtagtgaatgagtgcctggaccacacaggccagagtcgaaatctgttcacctgccttaatctgccactgtttggctgcttttaaaaaataaatgtacatctttgtcttggattgtcttccttaatatcacatccaaaaactcaatactagcaatttttcagaagacctcgatgttttgggcagcccttagacctccctgtcacttgacccaaatggtgctgggttgaccccagtccagcagggaccaccagtgctgtccccaacatgactggttccccctgtctctccccccacatgcctggacccccttcctctccctccacatgcctggacccccttcctctccctccacatgccctgttccccttcccctcccccccacatgcctggtcccccacccctaccctccccgcccttgtctggtcttcagtgcctccctgatgaggggcagctgcccccattctcctgcggcagcttcaccagccacacggctcatccaatggcttggaccttgtttcattcactaaagcaccagctctagcactgtgaggtcattattgagtttgtaagcaaaaatcttcttaaggaacagactaatgtgtatttaattttcattatgtaccaggtacatattaagactttttgtttcttttaatctcagtaattcctgttttatagttccattatcctcatcgtgtaagtgaaaggtaagtggtggcagccggacatcaaggtgtgaactcgcctggggctgtacaggggcagagccagggctacgatttgaaccggggttttctgacctgagcgctcttctcttcattaccttctgcctcctccttctcaccacttaagtggcttcatgcatgcagggcttttaaaatgagattttctcaaagagccgtgtgtctgcaggtggcatgcgctggcactgggctattgggaggcacagagttgttcctgggtctctcccactggagaaagcagtgtgtttggctgagccagtgacacagggctgcccgggagcggcaccaccactcttgggacaggtgggcaggcgctgttgatgtccctggatgttgtcccttcacctgcagtttgtcaccaaagccccgagggactgtggtagagacacagctagtggggacttctctgttcgcacagagactctgcagttgcagctacatcacactctggtaaatagcgcctctggcagtgggttttaatatccacgttggttgttgaagcagtatattctaggggtgcctgggaagacagtcgtttaaaatgtctctgctttttataggtcagtttttcttcttctttctcactcccttgccaattgttggacttaaagtttgttggaaaggcccttcctttattttgatttgtgcctgtgctttgctccaaggcaggccactgggggcattttttacaccgaggacttggttggaaccgttaaccagtggctggctggtctgtttgtttacaaggcagccccgcagccttgttctgagctggctggctcctagatgttatttggatttgcttcctctggcaccaggccctcctccaggcaggcgcttgggcaggctggtgggactgatgggtagccttgctggggacgtgtagtcactgtggcgctgccagcaaactgttctttctggaagaggaacgcttggtgcctgggtgtgttcagtgtgttctgttgtgcatcagagctccctcagacgtcgaccgcttctgattccctccagacagctcccggtggacacgcagggctatgcggcctgccctgggggctatggtgctgaatcctgacaaaggccctcttctcgggctgtcagaaaggacgaggctgagtcaggctttaatgtaaaccatcactccctgtttttctatttcttcgttgaaagaagcactgatcattgtgttcactagaaacacctcaagtttttaaaaggctcctctcctgttggtgtgactcgagggcgctgtgacatcctgagaaagcggggactctgggagtctggatgtcaagctggtcccgtctccacccgccttgagttctcggttctcgacagcgcccgtgtgatgatgatgctcacgctccggtgtgacacagacggcgcgggagctgcacgggagagtgctttggaagtggaagccgcaatgtcatgtaagctgttgagtatgaattgtatcatatttcacaatccacagagtattctcccttatggtgtcacatttgctcttactaataacccaggacttgtcaaagcagacgtagtgcataaaacatcactgtgttactgatgaggtaccagatgctccgcgtgcggccgtctggggtggacagcttcatttatggcagagccaaacaggagcccggatcttctgatcccaaatcccgtattattttcactattccatgctgcctgccttcaccaacgtgagctgaagttattacatgttatcactttacttgatgccgtgccgtactttacacgagaaccagcttcccgttggggactttacagagctttcggcagggacagtaatgggggcggcccctgggaagctgtgcaaagtagcatttgcggcgccacatcccgcagtgtttcctgaggactcgctgtgtgcaggggaccgtaagatgccacagagaaatcaaggaggctgcggacacagtgtctgtcctcaagtcattcatcattccctttctctgcccctctgccgtggaaggttttcaagtaattaagctgcttgcttatatgcagctttcctccacgggccccgcctgtgcgtagtcgtgctctggcagagtctctgcaccttcctccctcgggctcctgggcctgtgtctgtccgtcctccactgtcttgctgtctgcatcttcatggtgtaagtctggcccctcagccgccccacaagcctggcccggggccaggcttccagccgctgcttcaacccaaaggtggaacacctgtttcctgcagtggagaagatgggaaagccttttctgcagggcttttactcccacttccttcttgttttcagccattttctctgtgctgtttttctcctttcttcctgagactttcccctttgacttgttcttagtcttctttctttctcttttgaacaggtagcggtcttgttatgttgcccaggatagtctcaaactcctggcctcaagcgatcctctcgcctcagctttccaaagtactgagactgcaggtgtcagccccatacccagccagtcttctcttttctttactttgagtttaggcttcttgagttgttttcttcttctcagatgcttcagggggtagctgagaatgttgaaaatactaaagtgcagcagaagcaaggaggcagagccagccctggtttcccactgatgatcaaatttctttttagctcagaaatactggcttatgcctaacccatcaaaggtgcagcattgttgggcacaggatgaaaaacagacagcccccacgtttggctgtcaaaccacatgacccagaaatagccatcattgtaagaaccccagagggagcctttgctatcttttaatttattgcacaaataatattataacagtaaacaatgaaaaggaagaaatgaaagaaaaattacccagaatccactgtttttgctattccatattcttcatacatttgtccatatatgcacataattttacttacttggaattaaatatattttgtattgtttttaatttgaagatcactgattttatattgctattgatattttcaaatttagtattccatcacatttatagacagtattacttaatcatttccctctcataaaattatagtgcttgcaaggagttttttcctgttcatctttgcggtacatagaaccttccttagctgtccatggtagcatgcagctgtagtctcagctacgtggaaagctgagatgggagggtcacttgagcccaacagtttaaagttatgatgagctatgattgtgccactgtactctagcctgggcaacatagcatagagtaagatcctgtctcttaaaagaaaaaaataataatattttcttattttggactatttcttagaatatgtttctgggaataagatcagtaggtcaaagtatatagctcttgatatcttttgccaaacttcctttttttttttttttttttgagatggagtctcactctgtcttcccaggctggagtgcagtggcgtgatctcggctcactgcaagttctgcctcctggattcaagcgattctcctgcctcagactcccaagtagctgggactataggtgtgcaccacaatgcccaatactaatttttgtatttttagtagagatggggtttcaccatgctggccgggctggtcttgaactcctgaccttgtgatccgtccgcctcggcctcccaaagtgctgggattacaggtgtgagtcactgtgcccggcgctgccaaacttctttactaaaaggttgctctaattacacggccccaaatcacacatatatgaaagtgtcattttcaacacaacattattttcagagagaaaatgttccttactttgcatattgcaggggaaagactgtattctgcaggtcctgtacgtgactgcaagaaaggaccagtattacaaggccagagacagagaaggccccacagtgacatctggaccgaccagtattacaaggccggagacagagaaggccccacagtgtgacatctggaccaaatctttttggtgaacccaagtgctgagttattgatcaggaagtgaagggggaggccgggcgtggtggctcacgcctgtaatcccagcattttgggaggacgaggtgggcagattacctgaggtcgggagttcaagaccatcctgaccaacatggagaaaccctgtctactaaaaatacaaaaattagctggacgtggtggtgcacacctgtaatcccatctactggggaggctgaggcaggagaatcgcttgaaccagggagtcggaggttgcagtgaaccaagatggcatcattgcactcccagtcttggcaacagagcaagaccctctcaaaaaaaaaaaaagaaaaaagaaagtgaagggggagcggaggccagtgtgggaggaagagacaggaaaggtcatctggatagtaaagatcacctggtttcatgttatttcgaaatttacggataattttagatatgtggttgaaaactattaaaaacttgaatattcaagcaggactagagaaagtgtctctggtatgtcttcattccagccgtcctgctgtgtgtgaagtggtatctcactgttccgctttgcatctccctaacgactaatgacatcaggcatctttttatgggcttattggcctttgttgtttttttttttgagatggagtcctttgaggtgggaaagttttattttattttggtaaagtccatcttatctattttgttgttgctgtcacctgtacttttagtgtcatgtttaagaagccgttgcttaatccaaggttatgaagtttgacgcctgcgccgactccagcacttttatagctttagctgttacgtctaggcctttggtccgttttgagttaatttttgtaaatggtgtgatgaagtcttaaataagcatagcttggacttttggatctatttttaactttgagaatgttttctgcaggaatggcagaaatagatgtattgctggagtgactttggaactgtataaagaaaaggtgaacgccagaggctgaagagggaaggagctctttccctagcaggtttctgtgtagcgagcatccgtggctggggttaaagtgttatttcattatgcagtttatcaaatgggaaaagacaaaacctaagggcatttgtatctactccataccataaaagtttgccattttactttgatcatataacaactctgaaaaatactgtttttcatggattaatcaaattaccaacattactttaaaatcacaccgagtcactctttctgtgccgcaaggtgctaggccagtgacatctctgatcttgggagccgctgttaggagcctgatgttaatgacagataaaaattgatgtcagatagaaaattaacctccttcagggtatgtgaaactgcttcccctaatcctatgttcttccttagcaaaccgaatgcaacccaggagctctgaagaaggaaaatgatcagctgtttatctgcttggcaccctttggaacagtcattttcccatctcatttgaaagcagcagttagaaaaatcacaaagaaatagtctttctaaagttttccttccattttaattcttttgtgtttttcttcatcacattttccatacaccccacacgattaaagaatggtcattctgcgtttcaaggggcccaggcgggaggatcacttgagactaggagtttgagaccagcctgggcaacatagcaacacccagtctgtaccaaactttcttcaaaaaattagcctggtatggtggtgcgcctatggtcccagcttctcgggagaaggaggcaggaggatgactagagcccgggagttcaccactaccgtgagctgagatcatgccactgcactccagcccacacagcagagtggggcaagacctggtctcttaaaagaataaaatattgactgaggatcaggacggtaaaatcacgagacctcagagaaggaacaactgtcgtggcacctcatgtgcggtgtctggccgcggcgcctgcgaatgggttttgctcttggttgtcttggaaccaaacatctgtgtgctggcatggactggacatcgccaggtgtttggaccatatctttgtggtttagcacaaaaccaagacatacagtttgtacctgtcatagtcactggagaagccgtgctgttaattgatacagaaacacagccgtgggctgagatgcaccttctgagcccatggctgtcctcagcctcatcacagaccccaagctgaatggtcctgccggactaggcatgagggctggagctcatgtgtgcgcccgtaagctggctttccattcagtggtttcaacttctgcctgtagaaacaccaaaattgtccatgaggtaaatgaaaatacatcccaggacactctcactgtcctcccattgtctggtgtcttgttgagggctctggccaggtcaacaggcaactgttttgtcctgtgaaagtgtggcgcctccgtggctttctgggagaaccgaagagagagacttgcagtcggcgaggaactccttggcgcaagcagcgtgcggatctcctcatgcttctgccgtgcctacgtgcactgacgtcgtcacaggtgggggataagattccgtcgcggtcggagttttcctgtgtgaacattgagatgtgcaattccgtgaccgcaggcactgcccctccgacacagtggggttcatctgcttgcggaagcctcttaagggcggttgggagagaccctcagtggcgcatgtctggaggctgctgacctagcgtcgcaaccatagaccaggaacacaagcagataaaagcagcaagtgggacagattgaaccagctcttggcatagtttcccaccccccagctagttcaggagtctgtggacaaactgtgtttcaagcatgttgaacaacgcagtgtgcatttccaagttcattggaaaatctatgtgagttcacttgtttgccaccagaatgccaggagtgagctccgttctcggggtgctcttccttagcccccagtttttgcggtggcttaaggctctgcaggagtcgggggtacccaggctccactccttggcccgactccatgctgttgcggctctcatctgctgtgggaaactcgctcctcgtggacattttccacgcctctggctggatttctgctcagtagccttcagccagcggtgttctcatcgtgtccatctgcttctattaagttaatgggcacagacacacggcccataaagcagctggatcaaaagtctggttcttatcagacgacttaattgataaatgtcgcaatcacaagaagctgaaatgctgttgtgcaatgacttccagaatggtgttctgggcacgtcagcttccctaagtacaactggagccgtcggtggagaagagcggaaagggagagttcagttggtaggagggaggggtccagcgagagacagggatgtacacgaagtctgtttaactttacatattgggtgcagaaaccaccacggtttaaatgcttaggaagacaactggatagacggtggtttgtttctagccctgattctgaactcatctgtcctgaaaaacagttgctgacaccctctgaccctcagaggcggtccgggctagaaggggattagtggaggacatctcggcagggctgctgtaggcggatgttgtccagtcagagcggaaccgtgacctgtgatacgtatacttttcatttttgccgtttatgctatttttagattgtctttattttacatattaggaatttgcacacacgtcaggtgagtcgtaagagtcacagaggaagttccttcttagcctgtggcagggtggatcctgcagctcccttcccccctcaccctccccccggggggcctcactcacacagcccctccggctccctttctttttatgagctttcaccttactctgttttcctcttttcttcctgatttccctaattgagtttgagtcagtgcattgagcgtgcgctctcagttgtcaggggtacacacttgtgtgtgattttttatgtggctgagatgcaccaggatcctgttgcctcagcccactgtggtctttgggtgcagaggagggttcttatgcccagccacttagccagcagggtagctgggggtgagtttcagaaccttctgaacctcaactgtctcccctccagggcaggaaggataataacacacatctaagcggggagggtgataattgtgcccatagtctaaatctttctcagatcctccggtgacattgccgggtggcctgagctaggaggaagggtgaggacttaggcagatggaggactgtgcatttcagttttttgttttaattaatttttttaactgacaagataacttagagggattttttaaattggcaaatagaatcttcagctttgccttcggttccctcatcgtagggtcagctcgtggctgccaccccaagacaacacttcctccccgtggccgccctgcggttcccttcttcccggagggtaccaacgagctaggcctggtgctgccgaaaaggaactcaggaaaaggttccaaaatttttaataggaagaatttcccaagtctaaaatacacagaacttactcaaaaagggccccttcttgtggatatttttaagagtacattttgccacgctgtctcgcgtggggcctctgcagcagctgagacgtttggcagtttcttcaagacttggagtaaaacctcgcctgagatagaatctaaatacactgggcttggatcgcccatttgactaaatttcgatcccaactctagctttcagaaacctccttatagggagagacctattgctatgggaaggcaagagaaattaatgtctgcgttattccagcaaagcccctgcactgcgctggagggacttttgtttgcgtctttgggttgcagaaggggctatgattgtgcgtggcttatcttggtctccagcccagtttagacctccttctagctgatctcttctctcacttgtactttggaagagagtcagggcttggctttgggtcaccaggcgtgcagccatgtcagagctctggagccacctcggttttgtccctgtcacggggattgactgattcttaaatgatctgcgcgaggcggccctggagcctacagcagcaccgttcccccagggtatcgctggcctgtgtttcacatagggtcagctcttcgggggttgtcactgagtagtaagtgctgagccctcctgtccctgtttgcagaggcagcggctggtttctggctggccagtgattcctccaccctgtgaacacacgtggaaattgacacggtggactctgggatgtaggggaaggctctgggtcaagggcatggcttctttatatagaaagaacaagtcagatggcaggaaagatataatggtgggtcatttaagtattggttctttgtaatttaaaagaatcactttatttatttatttttttatttttatttttttttaaagaactgagttttatgggtttgccacaaagccattctacatccccgacaagaataagaataggtgaggacccagcagtcgcatgtgaaaataaacggtgtatttagcgggaaactaatgcctcttgcagccatcaggcactgttttcccttgatcctggaacaccttggtttccggggatctcagccccagccgttgccccatagctgttcctcagcaccgcagtcgtggaagccctgtactgaattagaaccgagcagccctggctctcaaggggtcacggggtgagaggaccagagttctgcaggcattttcacgtgagaaactccagtcctctgtggctgtcccacttcctgacagcttggcttccttcaggcagcctgagtattattcccatcttagctctgtcggtatgtagtataaacacagtccatgttattgatagtttcttaggtaaaaacacattaatatttgaatcgggccaaggagcacggagaatctgaagttgtcgcaaacaagctggctgtaaatgggctcctccagggcaaggcacaccccagagctactgggggaggtggaagcttgctgtgtgttgtgtgtgtgtttcctgtggttgatgctcataagcgttacctccgtggaagaggtttacctttttaggaaagagttggttttctgcttttgcaaatttgtaccaactgttgatcatctcaaggacagtggagaagggacaggcaaggagcctccctttcagtcttggcattcttcgaaaatagaaggtggcttccttaaatgatttcccgacttgactcatcaatgtaggaatgcctgtgttgacactctcttccccctctctctctccgtctctgtccccatcccttttactttttattataggacagttttcaaccattctgtggaacagttgagaggatgataaagtgaaccctgtatatattaaatcacctacattttacaattatttgctctgttgttttgtttttgtgggtatgtttgctaaattacagacaacatgatgttttaccacccaaatacttaatcatttcttttttaaaaaactgacatttttcttataaccaaattatcttaactttttaatgtcttttgaacccaaatggcagagcccttgcaattagccttgttcccgtggaaggtgtattccattgccggccaggctcatgcatccagcaggcgcctaaggggctcctccgatatccagccagctctgacaatggggccgtagcccagaacaaggcagatgggattggctcattatgtgggttggcagaaagctccgatgaggtgttcatctgtatttctcttaccaatggaataattgtttttcctttttgctagcttgcttctgtagcacggagggccactatgaaatagcaaactcttgcacttaatttgtatcttgtcctgcttaccggcctagaagctcctaaatagagtaaacttttctgtacattacaaagtgcagctgtttaacgtttgcaagttaggaaagtcgcttctacttggttttcttctaataatactaaaaggcatactttttttttaaggcaaaggatctcactgtcacccaggctagagtgcagtggcacgatcatagctcactgcagccttaacctcctgagctcaaacgatcctcctgcctcagcctcccgagtcctctgaccatgcccagctaacttatttgtggagatggggactcaactgtgctgtccacgctggcctcacactcgtgtcctcaagtgatcctcctgccttgggctcccagagtgctggaattacaggcatgagccaaaaaaaaaaacacatacttttaaatttagttacaaatatcgcatgatttggcacattaatttcatgtggggatgtttagttctttgggttttttttaacctgctggattaaatgaaatgctgagagttgaagaaattggcttattttcctttttcttttctttttttgagatggagtttcactcttgttgcccaggctggagtgcaatggcacgaactcagctcactgcaacctccgccttctgggttcaagcaattctcctgcctcagcctcccgagtagctgggattataggcacccaccaccatgcccagctaattttttgtatttttagtagaaatggggtttcaccttgttggccaggctggtcttgaactcctgacctcaggtgatctgcccacctcagccccccaaagtgctgggattacaggcatgagccactgtgcccggcctattttactttttttttttttttgagacagagtttcgctctttttgccaaggctggagtgcagtggcgcaatctcggctcactgcaacctccgcctcccgagttcaagtgattctcctgcctcagcctcctgagtagctgggattacaggtgtccgccaccacgcctggctaatgctggttttttttgttgttgttgttttgtttgtttatttagtagagacagagtttctccatgttggtcaggctggtctcgaactcccaacctcaggtgatccacccgccttggcctcccaaagtgctattttaattgtgtatttattgccactctgagctatatttgaaaattccttttgtgaaaaagaatatttaaaaccagacacctccagcagtttgctgtatctctgtatgactaggttaaaatgcacaagtctgtgaaagcttcagtgacaccttcatcagtgtaaattctagagacttcacgtgccagctaaggtgaagtaagccacctacagcctctctgtcccgctcattacaaagaaaagctctggtcaggatacagaaaagcaactaccaaaggctaaaaatgagcagggatattagggactggagtcaaagtcagataaaatatagtgatgaatctctaaatgtaaaacattttatttgggaagcaagatttacagtcgaaggcatacaggcagaccaggtggtcttcagtatatcttgatgaacaaataaaaggttggcagttttaaaaagaggagaactgtttcgtgttgctctttgagaaggttcttcggcactagtgaggtttctggggagctggcaggttcccgactggtgagtgggtgaaatgagtcctcgaatcacagcaggttgtgtcggttgccattagtgaaaactggtttcaagtggcagcaggcagtttccgcggccaggctggcagagaactacattgctggaggaatgttttgtggcccgagtgctttcccccggccccttgactctgactgagttgggtatgacaagaatgacccagtttgtatgatcagctctcacagtgacaatgacagtcatgatggggatgtgttttgagggccttttcctctcctttgccgaggaactgcacagggaatgctgatggcgagacctccagggaagccacttatgtcttcaccactagagaaggggggactctgcatgttggcgagagcaggggggtgccacactccagcacatcgtgtgttcaccttctaaccgggaagctctccttgttcaggagttttcatagagcgtctgtccatggggagaggagtggctaggtggggtgggtggtggtgtcccggaaccagtcccccagggatacccagggatgactgtatatgcccggaccaagtcctgaaggtcatagcagaggccgcttctgcacagtggggtgggagagtgaaagttagactgacgcacttttgcgtgacacatgtctgtatgatttgggtttttatagtgaccgccatttgcttttattctaaaataaatcagcatgattcagtgttgtgtaaaagataaatatgaaaatgctaagctatctcaacatggtgggtttatacaaatttttcacttttttatggtaaatacatgtgggtttttttttaattaggaggaaacaaaggaattttcattctcaaaaatgaaaacagcattcaatagttatttgtatgatatttgacaaggttaccgagctgaacattaatttgttcttcattgttaaaagaaaactctaggcaaattgaatacaacagagtttaattgagcaaagaaccattcttgaatcaggcagccccagaaccagagtaggttcagagtgacaccggcactgccatgtggctggataccattcatgggcagaaacgaaagtgactccggagaatggaagagccgcagcagctggattggctaccgcagggggtctgccttgcttgagcccagttcgaacagttggctgcctgtggtagtctgagactcagctgcctgtcacaagaccaggctgtttatacatcaggttgggttacagttcaccatgtatatggaaccattaggccaaacataaaacatgtacggaggcagcctttaggcgaaacttaatttaacatcataaaaatcttgaagccacttgtttgcgtacccagcctggatccgtcacaattcttgcttcatgccacactcatcactagtccatatttggcctccttttaagcagttaattaacaggtatttttatagcataatgggtttcctcaaaccaccacccaaccaaaacccagcccttgatgatgacctgcgcccaccacgcagggcgcccttgatgcacacgcacctgccgcccccgccctgtgaccaccgccctgagtgccgggctcatcatcccttccatgccctttctacattgctactatgcatctgtgtgtattcattaagaccattacttttctttcagattttaaatttattaaaggctttagtgctgaatgtgattttgaggactcttttaaaaaaatacttttggttggaatgtggacatttcccacttagcattgtgttgctcatgttcctccatattgatgtgtgtttagctagagtacccccgtctaactctgcgaatatgccacactgtgtgcacctgctactccttaatggacacttgagctttttcagcttcttcctttatttgtttgttttgctttgctttggtgtattgtattttatttttgctattaccaacagagatactttgaacattcttttctgtgtgttcttttgaacacatgcaagaatttcttatatattgaaaagcagagttgccggatcatagtgtataggaacattcagttttaagggatcatggtaaggtgctttcccagtggttgtgccattttacactcctacagtggtgatggagacagcctatgatccacatcctttctagttcttggcattgccattcttgtacatttttgctgagtaggtttagaatgatatctcgtgtagcctggatttgcgtttctctcatatcgcatgatgttgaacatttcctcacgttcagtggccatagttatgtcctcatctttgagatgtctgttcatccatttttctattggatttttaatgctcttgtggatttatatctaggttttcaatcctggttatgatggatattgcccccacctttttgcttttcattttaggacgactacaaatgttaacaagtttgtgtgtcatcattacttcatagatccccttcagcgtctcttggagttttctcccctctaactttagcttgtcatctgaaagtgtcttcctcatgagtctttttgtgacaagtcttctgaggccatatgtgcctctgagagtatttttgtcatgctcacacatttgaatgacagtttggctggatacaaaattctaggttttagcttccttttcttcagtaaattaaaaacaccagctgggggtggtggcttacacctgtaatcccagcactttgggaggctgaggtgggtggatcacctgagttcaggagttcgagaccagcctgaccaacatggcaaaaccccacatttactaaaaatataaaattagccgggcatggtggcgggaggctgaggcaggagaatcacttgaacccaggaggcagaggttgccgtgagccaaaatcacaccactgcactccagcctgggtgacagagtgagactctgtctcaaaaataaataaaataaataaataaaaataaaaacaccacttcattgtcttcctgcatcctgtgttaatctgataaaaataaaaacaccgctccactgtcttcctgcatcctgtgttaatctggttcttgtttctttgaatgtgatctactctttgtttctggaagctttgtatgtattttcattgtctttttaatattcttgatcttcactatgatgtacctaatttatgatgttcttcctctgtatatcataagacctcacagaatgtgacgattaaaaaaatcagtataaaagacagaacaatggtcgccaaataataagcactaaataagcaacagctgtgttatattatcattatattcagctttgtgggttttttgagccatttttattacctctgcctttgcccactctttgacctttcattgctcagcaacactctgatgtaggtgaatgaaagaaatcgtataaaatgtgaaaccagttgttagcaattctggtataaagagaatttacatttttggctaaaatgaagtttgcatactatcagtgactgatatatccatgctacgcttattcatatagccatgctataataaagttgcatgatattcccattttaattttttatttaagggaacattatattttcactgaatttataatatgcttatctcccagccaataattatttttataatgtgtaagtctctgtgtactaattccaatatctggccaactatgaatctgtttttattgacttttttctcttgattttagatagtatactatctgttgtggatgaggcattgtagacattctagattctgttattttcttttgggcaattacactgatcttgtagaggcttcgttataggactaggctcttttggctttgatcttagttctaaggtgtggttcataatccctctggggtgtccatgtcctcagatgtgatcaagccctgtagtttggcaggacctgatcttctctgtcttcacagtggcaagcagatgtcaaaatctctactctgcgttttcaaccttcctgctgtcctccacggggatcctgggaatattatcctgtgtgcgtgcccttcaggagccagcctccgactcggggaaggtttacatgagggttttggctcccttcttcctagggcttttgcctgcaatatccaggcagccttgagcatggtctcaacccagtaaggctgctgcctttcagtcgcatgctaacccccacatgacttgtgagtgaggagcacccttgggaaaagccagatgaaagtgattcatgcagagttactctcattttctaagggtcacggcccttccatttcctgccttcctgcctgcatttgtttgttgttcagaattttcaaatggctttttaatattttgtccagagcttatcattattggcaaaaggatgagtctgatataagtgattctgtcattactggactctagaaatcccaatcagtaagtacattatggataaaaagacaaagtagcatggttcgcataggactcagatttgaaaatgcatttcctgtagatcatttttatccacagagaaattctggtttgcctgggaccaccgtaggagctgcatgtgtctgtgctggtgcagaggtgtctgggcatggctgaggagagcatctgcaagtgaagccagcagaggagaccactcagagtggcactgactggctcggggaagcactggggccacacggggcacttgatgccgtgggaaagggctgctctgtagcttcaggcaaacgtgggcctcacttttattttctcagctctttgaacgataaaacactgactactgcagccacaaccaagaatataacttcctctctgctggctgagccaggtatcacttcttgagagagtgagtgtggctggcagccatgcatggggtccaggatgaccagctcagcctcccctcgccctgcagggctgcaaaagtgagactgtcttcacacctctggctcgttgtcttcctggttctggatctctcagttcctctgtgtctttttctcccatttcctatcccactgctatgggtaccctcctgggtccaccatcccccatagaggagtcactgccacgtctcccccgaacgtgcctgacccttgcactgcaccctcccctgggccactgtccttctccatcactcacttccagccaacacttctgccatcactcacttccagccaacagtccgcgagtgtgttttggagatgtgcatacttgctctgcacctgccattatgtttttaaggggtgttatttgttcttaattttaaaagtaggtgaattaaacattttgcatttctcctactaaaaatactgcattgcctttttactctgctgcctcgattctgcccactgtatgccagtagcccggatgggaggagagatgctttcctacctcctgttggcgccacgttagagaaagcctgtccggctccacacgcgctcctaaggatggacctgcgtcagacatgaacccagctctgacctgtaggattttatgattatgaacatgatataattgaatttgcatttcttttgtgtgtcttgaggctactcatttattctactccagcagtctccccagctcacttccttaagaaggaaagaagtggcaggtccagtccactccagcatctcgtttggagactgagctttattaagcatctcggcgctcctctccagggaccgggcttcatgtggctgcaaacggcttctctcctttctcctgacaactcactgtggcagctctgtagtctcacgccttgacagaatggcaatgagattttctttacaaatctaaaagctgccgaattaaggaaatctgagtgtacttgttcaccgtggtagtccctgtccccacctttaactcttccctttttctgcaggcctgttgaatttcctgggtgactgttccattcatgccgttcacattcttttctttctctgcaggttttgcatgcagaaatgtgtcagtctggtgcctggcgtcacactggatttgatagaaaagtaagtaggatttttaagctcttgtggctctctggatctgatgagtttcttttcctttttgaaggctcttgcttctcagaagtactttctatcaacatggcatgttccctttcatgtggctgtgttcttttgttctctgattaaggctgtgtttgtgattgtcacactggggcttagtgcaggagataaccaaacatgggccatatgaaaagaaaaataataaaaagctgaattcctttgaacatttaaaaagtctccagactttaagccaaagcaagaacataccacttcgcatacaaatcatttctgctgccactgaaatgatagctagatcatagctagctcttaccttattttctgaaactgtccctttaatattctgtaactttccatcccctccccccctgtcgccatccagtttccattttactatctcagggcaaactgatttcagaacctgagcgatgaagtgacgggatttagtcaggcctatgaagagtcaatggcacttgcctcccataatccttccagtcccattggccaacccgtctgtccctcgcgtgatctttttggatctgaagtggtgtttcaggacccggagcgtggcctgcactgccttgttctgtttgtttgtgcaccggattcatcgtgactcatcctgagtcatccaggcagtatggaagaactttggagttattttaaaccctttggctcagaaccccatttcttctagaattaacatgcaagataattgttttctacatcttaatatacaaagttatatcttaatattagggcctgaatttactaaattaggcaggaaaagcaaccccacttccaagtttctcttgtaaaaacgtgcttgccttgtgtatcaggggaaaaatgcaagaatattatgtgtaaacgttcatgagggcacggtgagctccgtcgtggttcactcccaccgtggaaggtggctgtgtggccaacaggaaggccggggaagcgacactggtcctgatgtggagtggtctaccagatgtgctaagtgagcagtcctcagcatgggtacctaacagagctcagtgcccagaggctttccaaacagtgcaagctgtgacttagaagactgtttccaaaggctaaacagatagtggaggctctcagaagcatcacgtggaaaataactttaaaaaaaaaatgggactagatgatctgtgctcccctccccttctggttggtttggttccctgacgagactgcagttttgcgaagctgttcttgagatctgtttactggtattgctgtgcgctttctttggggcttttatttccccctctgttttctgagttttagagctctctattacctgtaacgtatatattgcccccgccacccctgcgccctccccacacacacaccggatgcgtatcccaaatctaaaaatccaaaatcaggaatgcatcaaactgtaaaaaaatttttaatgaattaaaaaaaaatagggcatcttgctgtattggccaggctggtcttgaacgcctggcctcaagcgatcctcccacctccgcttctcaaagcgccgggattacaggcgtgagtgattctggccgtgccaggccaaaatcggaaactttttgagcactgatgtgctactcagaaacaatgctctttggagcattttggacttcatgttttcggattagtgataaatccaaaaaacttaactggtaagtataatgcagatattccaaaatctgaacaaattcgaaatccgaaacgcttccggttccaagcatttcagataaagggacacttaacctgtgtatatatattatatatctaatttcttaaataaaccatatccattaatatttcagcagttatattttatccttgctgggttggcttattcaggcagctcttgggtgaaaactgtcttggtgttttctgtttgtcgtgcctccctgtggctatttccatggtttcctctggaggtgggagggccgcagtatcctttctcctccgcctggtagcaggagcccaagccttacccacgcctccatctccgtgtgggacagtgtctcgtctccatcctggatggctgctgtgtgctgtcccatcccccctggtcacctgtgtctgtggctactccggacagagccccccggtcacctgtgtctgtggctactccggacagagccctgccagcgcgtgttgagccacatgagctcagacagcgccacaagctccacatctctagagcaaaaaggtctgttaaaaatcacctagtgatgacaacaaaaatttgttttaggttattgagtcaaactaccttattttactgagagagaacctggtatttagttcacttcagctcctgggtggccttttctgcctggttcgggcagggctggcctagagctcaggtctcaggacagccccactgtcgtctgcccaacacacggaggttttcccttgaacaagattttggtgtcagaacaaccagctgcctccctgtttctttccaaaacttaaaatgtgcacagcaacatgacatcctaagcatgattcacaaaagaaaaaaaattggtaaattggacttcatccaaatgtaaaatgtttactctctgaaagacacgctgatatgaaaagacaagctatagactcggagaaaatatttgcaagtcacatatctgacaaagaacacatgtatccagaatgtataaagatatctcaaaactcaaaaataagggggaaaagaaaattagaaaatagaccaaagacatgaagagacacttcaccaaagaggatttagggatggcaaatatgcttatgaaaagatcctggaaatcattagccattaggtaatgcaaattaaaacacagtgagacagcactgtccctattagaacggatgacatttaaagactgaccaaacgcagtgttgagaactcacatcacagctgctgggaatgcagaatggtgcggccactctggaagaactgtcggtttctcataaatgtccataaacctgccaacatgtccccgcattcctactcctggatatgtaccctggaagagggaaatcttaggatcacacaaaaacctgtgcgtgaatgtttacggtagctctgttcattaccccaagccggaagcaaccaaaatgtccctcccagggcaaatgaattcagactgtggtgcatccgtatgatggaattctgctcaacaggaaaaagggacaggctttctatatacaccgccatttgggcggttcccagaagtatcacactaagtgtcagaagcccatctccaagggtggcgcatggtccgattccctttctgtgaccttctgggaaagacagaacatggggccagagaacagatcagctgttgccagggattagaggggtggagagtgtggctgtgaggggctagcgggaggggcctgggggtgatgtcttgatgctggtgtggttccacagatccacccacacgttccaatccatagcatgtgtacctgcagaagtcattttgctatttgacaactgaagtaaaagtaatacataatgtaggggaggaaaaaaacaccacgagagtgagcaggccggagagtgcagagcagatgcagcacacggctggccaccgctgcggacaacaggccatgggcctggggagcgaggggtgcagggaaacagagacctggatttgggaaaggaagtggattctacagcagcatgctctgttgtttctgggaagataccttcactcttattattaaaatgggattgagtgaggattgaaaaagagaagcaaacacccttccccatccaccgtgggatgttagtcattttcatcagacgccctttccctaaatcacgatgttagcgtttgcagccactcgtgttcttcccagaaccagtgcatcccctccctccccagcaccaaaggcccttctcagccagtgcgatcagacagctggaggttagggcagtgttctcgtctttcttccatctccccttctcctgtgccaagtgatgctatgaaggtggctaaatgctaaaggtttattttttttttttaatttaaaagagacaattaactgttaatagtaggcagttttcaaaacacaccctgattagggattcggggtacgaggaggagagtgtggtgggaagaatatggacgttggagtccgagcagctccatctggccctcctgaccccttctgagccacactcactgggcacctccttgcctctgggtctgtctctgtcctgcagaatggacaccactcggctctcatcgggcagcagcagtgccgagggcatcacacatcctgacacgaccttggctctcagcccgtgtccgcctcccgccagacacttctgccttctcagcacttcccagagctgcagcttggatggtggctgctgtcactccacattcctgtagttctgtaagcgtctcccacgcctctccatctgccatcagctgaggcacctacgactcccaggcatcgttgccctggccccaccacagttagagagagatggcaaggcgccagagaggccgtgctctcgaggcccattgctgagacaaatggcttagcaggctgttttagtccattctcacactgctgtcaagacactgcctgagactgggtgtattagggttctctagagggacagaactcataggatagctataaatataaaggggagtttattgattaatattaactcacacggtcacaagatcccacaataggtcatctgcaagctgcggagcaaggaagccagtctgactcccaaagctgaagaacttggagacactcagtattaaccatcacactgggtaatttataaataaaggaggtttaactgagtcacagttctgcatggctagggaggcctcaggaaacttacagtcatggcagaaagggaagggtaagcaaggcatgtcttacatggcaggagagcgagagcacaccagggaaggggaagtgccacacttttaagccatcggatcttgtgagaactcactatcacgagaacagccactcccataatccagtcacctcccaccaggtccccgcctcaacacatgggtattagagttcaagatgagatttgggtagagacacagagccaaaccatatcacagtcgctgtagccacctcagtctttattgagaataacttcttaaagtgtgtggatttgggtctgagtcactgttctctgaatgcagttcagcaaaagcacctgttttagtgtctttcactaagaatccacgtcagcactcacagggtgaactcccgtggtgcctccgcctcacagtgtgacagaggttaaattgcgggtggctgaattatatttacattttttatgccaggacaaattccaaactttagaattatacagcaatggagaaatccagatctttgctccaaaaggtgcccagccacagctgccattagctctatttccaagtggacgtcagtttttaacttgcatagacacagtgacttctccgcttaaaaacgctatttttatgtttttttaatttttggattttgttccccaattatgtttaaagtctcataagaaaagttttttgtttgtttggttgtgtgttttttgttgttgttgtttttccagacagggattcgctctgctgcccaggctggaatgcagtggtgccgtctcagctcactgtagcctcaacctcctgagctcaagtgatcctcccacctcagccacccaagtagctgggactgcaggtgcatgccatcatgcctggctaatttttattttgggttgtttggttttttttgtagagacagggtttctctgtgttacccaggctggtcttaaactcctgacctcagatgatctgcctgcctcggtctcccaaagtgctgggattatgggcatgagccgctgtgcccggccatgtcttttgcatattgtattatctacaaaggacatgagttactttttaaataagtgatcttgttaatcaagtgatcttcctgccttggcttcccaaagtgcttggattataggcgtgagccaccacgcccagccaaagaaaagtttttaataagtagatttgattttgcagttacaaagtgaggcagaaaattcagcacatctatgtttaatagtgtcttccatgccgctgtggtttttacagtcagaggacactcctataaaaaatacctcgttatttttatactttatcattttctgaagatttattcttgaaatatgttgatcttggttactgtgacctctgtggctcagaccctcttggccagcctttctactacctcagggcccctttttcccacgggggtcccaccaacatatgttaactcccgtaacgctagcccacgtgtcaggggagacagatccactcggaaagcagccgtgcggtacagttgagagacaaacagatcatcatcaagctctactgatgaatgcggcccctgtgttccaggcagccaagactgagttcccccttatttcccttcactgaacatgtcagccatgtttgtgatgttcttgtgtgtcccttgccctgagttgacgctgggaccagggtgcttgaggatgagctcccagcaattccaggctgtgcctgtcaccaatgtgccccgggcaagggagtcacctctctgacatggaagcccagaggttaccttctggaagcaaaccctgtaaccaacttccctccttacagggctggaagcgtagcagtgtccaccatctgtggaatgtcctctggagccgccttgcccatgccacacagaaggacaccacggttagggcacccatgcgtcacagcatgtggccagcagggccacgccacctcccagggaggcatctgacatgcacaaaaccttttgagtttttgtatgtttttttcaacactttcctaaaatgcagtgatcaaaagttagttgcctgctcctgcttgggacaccagtccctcagggggtttgggaattgttcctcccagactccggggctgacatttggagggtcaccgcctgacccctgctccagagtcagcaggatggcgctcctccaacaccactcctcccatcgcatgtgggagcaggaggggtgtggtcttggaagcgacaccctatgatgcgcattcacctgagtggccttcctggccacagggctgagccaagggggggccaaggcactgcctccctccaggcagcacgtgtgtctaaaaaatttatttataagtacccagggaatatttaaaaatatataaatttttgaatagttgagagattttaataaaaacgtttgtgcattattggcagagctgtcagtgggtgctgggtgagagccacacggttgtctgggtgacacccccgtgtccctacacaccatgactgtcctcctgtccacctgagatggaactctgggttccctgagtcacacctacattaaaacgtacacagtcatccatcacgttcacatctgtgccggcatgacctccctggggaagcgtttgcattgctgccctttttgccaagaccctcccgagcgtgatatgacctttgaacctagagccagagaacctgcttgggcgtccctgccttcgttaaatgaactgatcttggatccaggttaatggtgagataacttgtttttaattatagttttaagaccaggcagaaacaggctctcgtgcttagtctgatttcatttacgttttagcagttcattattgtaaacagaatcctaaggactgtagaccgggggcgtggaaaccccaccacaacacagcacctagaacacacgtgtgtgacatctcgagtgacgcacattcggaacagatcgtgtggatgtgcagatgtcagggagtctgcagtacctgcgcatacactagctggggctggacttgatctgcttttagcttttgccagctttttagggagtctgaagacctagtttagctgtttcattcttttgtctcaactcaccacatggaaatttcttgcccttgagaatacctctcttgccactaagtgtgaggacgacgttggttcctgggtcccacctgactagtgtgacgagtcacgtgacgcaaggagaataacgggcctgtgttctcgggctttttgtttccgtcaagcttcatgacctgcaggaagtaaaaccaggtctgcctcacgctctgcacacccctcccctccctggcggccgccctgcacaccccttccctccccagcggccgccctgcacaccccttccctccccggcgaccctcgttgggagcgtgtgaaggatggtcctgagtgcaggctgcaggtgccaggtggtgatcggcacataacgtgacagatgggcaggtgtgtttgtcacgcacagacctgcatggtaggcacctgccccatgcccatgtgtccttgcccgctgccatctgagaggatgtaccctcatcctacaacagctggcccttggtgtgccaggtctgccaggccagagctctctaggggtccgtgttgggtaagtgcacggcaggtggccccctggccgagagcctcaggaccccgctgtctggggtttgggggctgagtgtggcacagcaccactttcatgccctctggaaggcttggcttttgcgacctggcctcctcaccagctcaatggcagtttcatggcatagcgtccctgctgcccccagacggtcagaaatccaacccgagtcatatcattatcctcgtctttgtcggcactggagacgtggggaggtttcgttcctcagaactgctgcacgatatgtcttccaaaataaatgcggtttatttcaaacagcagcactcaaaatcaaggctcctcaggaaatccagtattaaccccttccgagctttcgccgtccttgtcagatgggcaaaacacgttgtttagcatctcagcacaagactggagagaagatcgggcagtttgtgcataattatttagcagtctttaaaactaggagaggaatctgttttctaattaagctgctgtgtctggaagtaaattatagtgaaccttcctcgagcgacccccccagtttctaattatctatgctaacctagcagcctgatgaataagctgttgctgctgcagtacatatttatattctgaatcctttgagagagtggcaataagatccgtgcctggaaattaagggacatttttcagccctgaaacaaagtaatgcaacacttaaacagtgctagaaatattagggttttcagaaagctccggggaacctgagagatgtgaacctgttccacgaggctgctagttagtattctgatcactggaggctcaaagcgtacccagaacttactcgtgattaacattgattgtgtacacagcatattttaaaccgctaacaatccattgtcgtgaataagtgagtctctgtgtgctgctgcttccgaggctctggtagcacggctgccccgtgtggcccagggacagcaggtgcggggctgcagccccacagccctggagcttgggtttgactctggctctgaaaccttcagcattgtgttagctgatctctggttcccatctgtgggacttccgtctcatctgagcctggggatgcagtgcagaaaatgtaaggagacctgggagctgctgcttgagagcacgtggctatccgtgcttcctggggaatgatagtgaccgtaggaagcatttactgagcccccatggtgccaggcatcgtgctgaggcctttacaaacattacctgtaagtcctccctggagcccttcaagggtgggtgctgttgttatctaccttttaaaagatggggaaactgaggcacccagcaagcacagggcctgccaagcaccacaccattaggacaagctgggacagggatttgctggcagcctccctggagcctgcatctccttcccctcggcatgggctgtgtgaacagagcacgggctcctcaacaggagcccagacctctagaaggtctgcacagggtttgggggggcagcactcgtgtcagaggcacagcggctgtgattagaattcacttcatcgagggaagtcatacacatggattatgtttgaaaggaaaactatcaaaagatcccagtcttgattcaaaaaatacctttctttccaacataaatatacaatattggctggtaaaggtgaaaatcagtaattcattaacgtctgccagtcactgctgagatgagtaacgaggcactagacgctgatttagaaatgaagaggtggaagcaaaacccgagagatcgccgagcgagggggaggtgagtgattggcggaaacgggggaccgccgccacctagcagatcacccctgcctgcccgagcacagccacctcagcgttcccgtgcgcgccacgccagggcgcacggtgctgcacgggggtccttatgcccgggcgcctctcattaaggtccccccacgggcagagggaagacgggcaccgggtccccttcgtgttcgatgtgcaccccagcaaggcctccttagctcatccggattggtaggggtggaggaggcttggttctgagatgaaattgcagacgtgcagccaagggggaatgtgagaggttcagaggccaccccagggaacctgcacacagcacggagatcttccgtttccttcacagtggtacccaaaccctggtatttgtcatcaaaacaaaggcctgcgccacagagcacggagctgtaacatctgtggcattcgctccacctcctcacggctctgcacctcccagcatcctaaagaaaacgtgggctgggcgcagtggctcacacctgtaatcccaacactttgggagtctgaggcaggcggatcatgaggtcaagagatcgagactatcctggccaacatggtgaaaccgtctctactaaaaatacaaaaattagctgggcatggtggcgtgtacctgtagtcccagctacttgggaggctgaggcagaagaatcgcttgaacccaggaagcggaggttgcagtgagtgagctgaggtcatgctactgcactccagcctggcgacagagtgagactccatctcaaaaaaaaaaaaagaaaaggaaaagaaaatgcatgtgtctggatatctctaaaggaagccctcgctctgcggagatgcaggagcacagcttgattggagggcagcttccgttccttgaaggcaggctcccaggtgcagagcgaggaagaggccgcagtgaggctgagcgtgtgcctggtcagtgccccttggccgtcctttctgatgttggcctttgctcttgtgtaggagtcatctcagacggctcagtacctatggaggcacacgtcactgcggtcgcataaccgggatgaggctcagcccccattgatgcctcttctctagacgcatcgtagttcagcaggtgcacctccctccgtccagtctgccatttctccttaaccttccctgagagtctgttgctccagctccattgcccgcacggcccttcggttcctcacaacccctggttctggtggggtgcctggagtgcctcctctggcaggggtgcctccttggatctgtttatcctgcaggattcagtgccctgccgttgttcctatgtgcgtggctgcagacttgcaatcggtgataaagcagtgtggcgtgaggcgccagcataaccggggaccccgggtgtgtggtggcttttccggtgctcatcacagccacccggcgagcagcctctgaggccatctccatttaaacttctggaaaccgaggcaagggaggtggagagacttgctcagggtcacagagagtcacacgagggtcccctgtcggtggcggagcctgtgtccgcccccacccgtcctgctgtgtctgcccccagccgccgctgctggcttctcagtttgctgctccgtgctgcacagtcccctctgtcagagcctggtcgctgtgccctgtggcccttcagagaaaggcctccccgttctgatgtgcgtgtgttgtcttctgacctcgatgccagtatgttttgcgtgagtggccagctcgtcagcggggcctcgggttccaggctcgagcgcacttttcagaccccgcgtgtgtttctcagcacgtttgttcattcaccgttcattcagcagacatctgctgcggactggctgtgtgctagggcctgtccgaggctctggagccaagtccttgctcgttaacttacatcctgatcaggggaagaaacgcacataagaggagtgtgaatgtaccaggagagccatgtgatcgcacacaagagtgcctggatgcttctttgattgggcagcctgatgaggcccatgaagaggcaacactggaactgagaccacctggccagacgggagcagccatgccgggaccaggggcagcgttccagacggggagccccacagcctctgagccaggcacgagcttgggctgtgtggcaagggccttctttgaaagaggcatatgtagcttcagtatttataattaacaccgctaacctggcagcacttaatgggtctacaggggcctgtgtgagtctgactcagaccactgcatcagatggggaaactgaggcacttaggagcttgatggctacctacagaggacattttgctccatgaatcagtggcgtgacccgcagtggccgcagaaggggcagtggcacaagcctgactagtggctccgtttgcagagggggtgggggcgactgacggccagcaggagggccgtggtgttctcacctgagaaggcgggcgagcactccttttgctagaagaggctaagagatctctacgattatttccatggatgatgacccaaacagatttagtgtggctgcgtgtgtagctgctgtgtcttctagctgtttctggagaccagaatgtgcctccccgaaatatgaagaattgttgggctgaagacaattaagaagcaagtgcaagagagctcctttcctgccttctgtttccctaaagcaaaacatagatctacagagacaaaggcatcctgtcccgccccgtcccagggaggacagcagcaagccccgaagacagctccaggcccacgcgaaggtgtttccttcattttctagatgaagtgactgagtctcagagaggttaactcacctgcccaaagtcgcacagctaggagtggccgagcctggaggacagagccgggtctgtgtgatgccacccccaactctgcatcggctggcgtgtggaaggacgtccatcccttcacgtccctctgcgtgtttgtgagtgcgattctgaggaaagtggcatgagttttctgcatcaagatgcctggtctcaaagggcgggttccatgtggacctgacaaaatgaggggatgtgtacagcatgggaggagagaccggttattttgacccaagccccgggtgcccagtggtaggaggagtgctgaccttctgtgtgatgcatgcccaccaggaaaacctcagaggattatcccagaaatcaggcataaccacacaaggctgcctgtatttggaaactgtctttcctagggtgttttaacaaattcacaggaagacacaatttacaaccaggctaggaagtgactctgggatttcagcatcttttcagagacagaaagatccagatgagctcaggacagtcgggggaaggtggtggcaatctctgtcagaaccgtggagtgttcgttgaagatacttccacagcaggagagctccacgccccatcctggaagctcaccctcctcccctcccaccctctttaggccagatttttgcagagaagctccctgatgagatgcagcgtgcaggtgagagtggcgtctggagacagcctggaggcggccagtgcctccggagggaagtgctccccaaccccggctctgctggagcccgtcctgcttccccttattttaggagctgcttttctcgatgtggcaggcctttcagcagcttctcaggagactctgcttggaggtggcttctcccatgtgactcctgcagctgcctctcaggaaaggtctgtctgaaggtcggccctgacaccgggaagcccacagaaaatctgttttgcagaagtgcttcaaaaataaacatgggctcagatgtctttctgatgggctttggaatctgcctgtttaataaaaaagaatctgcttttcattatgtcatcaacatgttgaataagaaaatggggaattacccctcgcctcgctgtggccccatctctccctgtggtttttgtttgcagcctccagagtggccattcctgtccattgttgttgttgactgactccaggaaggggcaataatttgtcgttctatagtaagtcaggtaaaaggtgaattatctcctgtaatattaactctgcttactgttaagtcagggaaacttcctcccgagttcaaccctacatttacttcacaagtaaagatgagcagaagtctgtactaggggaaccattaaatacggaaggacaggatccaaagagatggcagcactgtgcatatgaaccatgtgatttagaaaccgagcagagatttttaaaaatcattaaaaaacaagccgcctctggtggtttttaaaaagccagtcagcttatgcaggggtggaattatggaactttctagtttctattgtctctcgggtgccatgttcactccaaaccatttcggtaaccctgagccagtatatcctcctggagaaattaacaactgcttcctttaagtcaatgtttttcaaagttcaagtcatggttgattagtggctatgaaaccagttaggtgggtcacagccagcattttaaaaaagaagaaaatgtcattgttttcatagtaagataagtgttccgtggtcctgttgcttgaacatgtatctcttttttggtttgcttttttgtttctgttgtttggaggcatggacagggtacgaacctgtgaatatgtatctttatatgtggttgtgtatgtgtgtttgtctggtcaccaaaaatattcctagggctcatgatcaaacaagttggaaagcttcttatttaaatgatctctactcttatgttaattggggacctagacacactgaccaccttaattgcctatactttagttaccatcagtgttgtgaatacttagtcgttttccaagaacaaccttgccccaaatccctgctctaccatcatcagccttgtgccatattatggtttcctataatctgtcccatttttaattaggaatattgcttatacgtatatcttttttctttgattttttcttttttttaaattctcttttgcttatacatatatcttaacagcctcttcttttcttgttgaagaaataattttgacaagtttttacattttactttaaattaaaaactcatttcccttttgaccacatgcattaaccctcagaactgaagaaggccagattaaccgtaccaactcacccttcttgggagaatgaagcaaaccttttatcatcaagatatgtcaccctttatctctggtaatgccttttgccttagagtccacatttttaaagtatcgtagctgaacaactgtctcttggttagtgtttgcagaatgcatcttttttatccatatgtatataaggtagatctctttttggcaatatagttagcttttatttagttttgttttaaaatagagacagaacatttttggttttaattaaagtatttagtttgtttacatttagtgtagtaattgatatatttgggtttaagtctgcctcctacttgcttcatcctttttttttcctgttgctttttattctagccaccccaccacccttttttttggagcggggggaacggagtctcactcttgtggcctaggctggagtgcaatagcacgatctcaagctcactgcaacctccacctcccaggttcaagtgattctcctgcgtcagacttccaagtagctgggattacaggcacacaccaccacacctggctaattttttgtatttttagtacagacagggtttcaccatgttggccaggctggtcttgaactcctgacctcaggtgatccgcccaccttggcttcccaaagggctggggttacaggcatgagccactgtgcccggccaagccccttttttttttaacttttcttttttctcctcccttaccatcttttgagttgatttagcaattttattacacctttcttctcttctgttggcttgttaattttatattctttactatactttgagcatcctgttttttccattaactgccagatagtatatgccttagactttgcaggccatgtaaggtctctgtctcatagtcttcccattgttacaactctttaaaaatgtaaaaaccattcttagcctgggggccttaagaaaacatgctcctggctggatgtggtccttgggccatagttttggtgacctgctttagaaactataacgtgcatcctgctaaaaactaatctaagcctggcacagtggctcatgcctgtaatcttaatgctttggaaagctgaggcaggaggatcacttgaggccaggagttcaagaccagcctgggcaacatgataagaccctatctctaccaaaaaaaaaaagttaggcatgatggtgtgcacctgtaatctcaacactttgggaggctgaggcatgagaattgcttgagaccaagagttcaagaccagcctgagcaacatagcaagaccccagctctacagaaaaaattaaaatcagctgggcctggtgacatgcccctgtagtcccagctgcttgggaggctgaggtgggaggatcacttgagtcccagtggttgtggctgcagtggctcgtgatgcaccactgcactccagcttgggtgacagagcaagaccccatctgctaaaagaaacaaaaacagagtaccctttagtacagatctgctgggaaaaagttctcatttttatttgtttgaaaatgccatcatttctcctttgttttcacgttttcaaatcagcgttcttgaggtgcattcaataaaatatacccacttgagctgtacaactgatgagtttgacagaccactgtgcccgtggagccacaccacagtcagcgtatatcccgtgtgtccccttgtacctgtcccagttaatccctctccttatccctcaagcccaggcaaccattgatctgggttttctcactatacattcgatttgatgtttccagaactttctgtaaacagaatgataaagtatgtgctcttttctgtctcttccttggctcagaatcatgcctttgagatgtctccttgttgggagtatcagtagtgtgttcctgttcattataagtaacagcccgtcaccctgtgtgtcacagtttgtttcacctgttgatgcgcgtttgaattgttcctgtcctgactgttatgaacaaagctgctgtaaacattcatgtgcaagtctttgtgtgggcatatatattcatttctcctggataaataccggagagtgaattgcttggtcatatggtaggtgtgtgtttaactttataagaaattgtccaactgttttccaaagtggtttgctgacctgagttcctgccagtaacaacagcgtgccagttgtggcgcatccatgtcgacacttggcattctgccttttcggggttttttttattttattttttgagatggcgtctcactttcttgtccaggctgcagtgcagtggcacagtctcagctcactgcaacctccgcctcccgggttcctgcaattctcgtgccttagcctgttgagtaagtgggattacaggcgggcgccaccacgcccagctgattttttgtatttttagtagagatggggtttcaccatgttgcccaggctgatctcgaactcctgacttaagtgatccacccacctcggccacccaagtgccgggattacaggcgtgagctaccgcgtccggccatcttaccgaagtataacacaatatcattattattttaatttacatttgcctaatgatgacagagcagcttttcctatgctgctattggccattaatttatattctttaataaaatggatgttcaagtctcttgccaattttcaaattgtggtgtttgtcttcaagagcccttcatgtgttttggacacaagtctttgtcctatctatacattgtgaacatttttgctaagtctgtggcttgtgtttttatttctaaaacagtctaggccaggtgtggtggctcacgtctgtaatcccaacactttgggaggtcgaggtgggcagatcacaaggtcaggagatcgagaccatcctagctaacacggtgaaagcccgtctctaataaaaatacaaaaattagctgggtgtggtgtcacacacctgtactcccagctactcgggaggctgaggcaggagaatcgcttgaacccgggaggcggacgttgagtccgtccagcagtgagctgagatcgtgacactgcacttcaacctagacaacagagcgagactccatctcaaaataaataaataaataaataaataaataaataaataaataaataaaacagtcttttgaagaacagaagtttttcattttgatgaagtccgatttcatcatttatttattttatgatttgtactttctgtgtcctacctaagaaatctttgccaaccctcgggttgtgaagattttctatttttttctaaaacttttagttttaactttcatgtttatgatgaacttagtgaactatgattaacttttaagtctgcgatccgtttcaagttgttttttaatatagtcaagagtcaaggatcattattttccatatagataccaaattgttccagcactgtttgtggaagaggctatctttttgtcattgaatttccttggtgcctttgacaaaaatcatttgactataactgtatagttctattctattctcttgatctgtgtgtctatctttattggcataaagataggaataccacattaccttgatcacggtagctttattgtaagtctctgtttttgttttgttttgttttgttttgttttgtcaaaatggttttggctactctagatccttgcatttcatatgaatttaaaaatcagtttatcagttctaacgagaagcctgctgagattttgactggaattacattaaatctagatgaatttgaggagaattaccatcctagtaatatggagtcttctgacccatgcacatagtggcttcatcttccataatcatcacatactgatttagttgtcttggtgccttggagctttatctgtacatatcttgcaaatattttgttaaattaatgtcagtttaaaaattatttaagacagcatatagaaatgtaattgatttttgcatagtgacctcatttcctctaactttgctacattcacttattggctctgggagctgtttgaaaggtttcttaagatcctctatgtgtgtaattatgtcatctgaaaatacatacagtttgacttctttatttccgatgtttatgtctttaatttctttttcttgctttgttgcactgcgtaatgtctccagtataatgttaaatggacgcaatacagctgggtgttgaagccctgatctgagtcaaggatcaatgacagggaacattttatctaaatctactaagtataatatgtgctgtgaatttttcatagatacccattatcaggttgaggaagtgcgcttctagacctagttttctgagagtttttctcgtgagttcttgttggaattcgtcagcggcttcctctgtgtctgtggaggggatcgtacagctgttcaccctgttcagatggtgcatcacatgaatgatgttcagatgttaaacagtcttgcatccctgtggtaaaccccagctggtcatggtatattacccttggatagattgcgggattttacttgcatttcattgaagatcatctcacatgtgttcttctctacctgtgggagacagccacgccctctccaacaaggcctaaacctcactctatccacagaacatagccacgccctctccaacaaggcctaaacctcactgtacccacgggacacagccacgccctctccaacaaggcctcaacctcactgtacccacgggacacagccacgccctctccaacaaggcctaaacctcactctacccaagggacaccgcctctctccaacaaggcctcaacctcactctacccaagggacacaaccacaccctctctaacaaggcctaaacctcactccaccggtgggacacagccacagcctctccaacaaggcctcaacctcactgtacccacgggacacagccacgccctctccaacaaggcctcaacctcactgtacccacaggacacagccacgccctctccaacaaggcttaaacctcactccacccgtgggacacagccacagcctctttaacaaggcctcgacctcactgtacccacgggacacagccacaccctctcgaacaaggcctcaacctcagccctacctggggcctcctccaggtgctgggattacaggcatgagccactgtgcccagcccttgatttcttaatatactaaatttttaatttccagggtttaaaaagaatagcttctagttttcttccaaaattgttcactttgtcctttaattccttatacatattaagtaagatgattgtcaagtctgtgcctggcggctccattatccaaatcctctatctctgtcttgtcagctgcttttcttggtttcaaacatatatacagttttccagtaattacctgtttttttttttaattgaatgctacaaattgaaaacggaaattgtacaggtatttggggtgatttgaggctgtgaagtctgaattgttttgagtttctttttcctcctacgcgccttttagagtctcagctcaacaactgaggagtttccccagatctgcttctccttggcagtgcatcacctcctgctgttgttccccagccccatgagcctgccgtgatctactcagcgtccctgctgctgggtcccttttttggagttgccagatgcttccaagagaggtggccccaaacgaaagctcaacccctggcttcccctcctcgagtcttggccccataatttctcatagcctggctgcctttccttgcttctaaaatattcccgaacatacacacagcctttctagctgttctccaggtgagaatggtctgaatcacctcatctgccgttacccgcaagggagcccgtgctgttctcaaaaccctaaacctgtgggaaccacacgcccccagatttgtgcacgtgatttggaatctggtgggctcagctttttagataatgcccagtggctgcacgtgagggtccgcaggcacagagttggacccacgtccccagccttccatgtccagctgggactctatgtggctctcttgttcccgttcctgtccctctgccctccagactatagcactgcagcccagctgacagagaggccgctcctctacctttaagttgcaaactattcagaccaatatcgtgtattataatttgtaaaccatgggttttatgcacgctaaaatggactttaattatgatcactcaaagtctgtaaatggctataatattgggcactgtgtagtgagaacatcaggtaatgttacagagcgctgaattgtacatcattttaaataaagagaggctggacgagaatatcacaggaatgcacgtttccttggttcagagcaatattagcttaagaaaaagtattttcactggtttcacgaaaagttatcacctggtgcattatttcctgatcttcacttcgaattgttttctttccccaaagagttgtatttttacaatgaccgacatgtgtgtgtgctttatgtgtaaggtttcaatgcagcgttcattgagaagctggatgaactcatcacgcttttgcacctgctcagattgctttcagtaactctcctgttactccagcccccactgtggagaaccactggtctgagatagacatatatagcttccctcttactagcaacctagccattatgcactgacctggattttcaaaagaattatttcaaaaaagaaattgctcagttcacctcccctgaccttggcatggaacctttgtaagtaattaattatttgcagtaagtaagtgaaccagcccaagcttctctacaccgtcattttcatagtagtcatttaaatttaagtgcgtgtccttctttaactgaatttaatctgagatgatataaatttttaaaatcatacagttttgactcggtacggtggcttatgcctgtaatcccagcagtttgggaggccgaggcaggtggatcacccgagctcaggagtgtgagaccagcctgggcaacatggtaaaaccccatctctaccaaaaatacaaaaaattagctacgtgtggtggcatgtgcctgtggtcccagctacttgggaggctgaggctgaggtgggaggatcgcttgaggctgggaggtggaagttgcagtgagctgagatcaagcctgtgcacttcaacctgtgtgacagggagacctcatctcaaaaaaatttttttttcataagacagttttgaaatatcttcccttttcaggaaacttgctgtagcctccttcttatttaaaaaaaggggggaaaagttttgttttcctttaatacgtaaattgtatgttttccgtgtagattattaagcacataagcaaaaagaattaaaatcatccattttctccagcatgccgggataaccattattaacactttgtgtatacccttccagacttttgtctaagtgtattcttgggtatttttttgattttgtgcccaaagagataatctaggggaatggccaccagagcgtttcacgagcttcttagatgatggaatttgggatgatttgtattatcttgttttcttttttatcatcatttgagtacttttagtgagtttgtcctatttcttggaaaccgtagtttttcatttaacattttgtttacatacagtttgacaatcattcagtggggattcacccattggctcatcgtatgtatgcggcacctgttctgtattcaacgtttcatgccatcaaatatgtacacggcatctgttctgtattcgactttcacgctaagcatcgtaacagcaagatgaagaaagaatgtagtcctcactttcagagcgctccaagcctcagcttagacacagcctaggcaacagtgtctcagagacattcacagctctctgggcaggcatcaaaggagcagccccaagcagggaacccctgggttggtgtgggagagaccccaggggagtgtcctgagaggaggccggacttgagccaaatgataaaggatccataggtgtcccctaagccaagaagacaggagggtggtctgagcagagcacacaggatgtttgagaatgacaagtctgacatggctggaaagcgatgtatttggtgaaatagaaagatggggaggaacagaaaatagcaccaggaaggtaaacatgcttgagttactcagcctccaccatggcagccgcgtgactgtgctggggagcagacactaggcagttaggggtgcacaaggtttgttggatgtaacacctggcagaggccaggacagaagctggacctgatgtacacctggcccaggctctgctggccccatagagagagagctgtcgctccaactcagaggtggcccagcctctgcaggccccgtggagagagagctgccactccaactcggaggtggccagactctgtagctcagctgtgctacagggccacccagaacagagaaaggcctcatctgaacactggcccagtccctgtgcgtaccagctgggactgtccctgtaccgcgctttttcctgccaagggcccagccccgtgtccacaggcagcagacagccatcggcatcagtgggagcagctgttttttaagtggggaagtgacatggcccaggcctgtggactgtggagatcacaccatgtgcttaacgagctgccgggagctgtgagattgatttatgtcaaggaaaacaagtcattatccatgggaatttatctagctacacagaaaattaacagtggaacaatggcgggtaataaaagaaaaagaaagtaagggattcgttgagcaccaaagaaatttagaggaagatctcagctgtcatcctgtgctggacagtccgtcacgtgcagagcatcctcccgactggcgaggtggcttccacgtgccccgtcaatcagggctggacagtccgtcacgtgcagagcatcctcccgactggcgaggtggcttccacgtgccccgtcaatcagggctggacagtccatcacgtgcagagcatcctcccgactggcgaggtggcttccacggagcgattctcgagacccgaggggcgtggacacagcttctacgcaggcagtcggagagccactgggctcttggccctcactcctccagccagaggagttttgctttcctttgtcctgcataagattttgtttgagtagctaaaaagtaatggaaaaccaccacaatgatcagtggagaaccttgtatgtttgggggcccagctgtgtgttaagagccatcagcctgtgtagcgtgagccagggcagaagggcctggcccgagaatgctgtctggacgcctggcaggcctggctgcagggtgccgcagaggaggtgggaagaggcatctttgggaggcctggctggccccagtgcaggaccagagagcagctgagggcctggggcctccggggtttcgagcctcagtgaaacgcgaatccacagggactcttggagtggggaccagcagtggagaagatggaggcattgcacttgattttacacacgttccgcttgagctgtgatgccaggcaagccgagggtgaagggaagcgccttgtcgtgagacctggaaggagcagggctgccgctggagcagatcctggggtgtgaaaagagctggcgacgcagtgctcccagaggtcactaagggaggagccgggtgccaggggagagacagtcaggatttgcagattcagcaaatgaagaaaggcaaggctggccagccactggagtgagggggcttgggaggaggtggcttggaagggcggtgaggacagaaaccagctttcgcatggcaggtaagaggagcctacgggggccaaggagagcttagctagtgccagcttcagggccacatgggttttccccagggtagacaggcataaggccccagcggccactgcatgttgagccccagcagccagtggtctccccggcccatccctggtcctcccattcctgcgaggcggctgcggggtctgggtctggtttctgccacttgtctctagtggaagacacaccctcatagagcctcagtttctccatctgaaaagcaagtgaacataagacctgcctggcgtgggcattgggaaggaagtcttggtggacttggcaggtgggtgacttgggggcctgggtccaccgagccgcacagcgggaggcacggcatgagtgcccagctggcagcggtggtggaggtagtgtaaatgttcatgctgaagaaaatccaagcctctgagaggctgggcagctagtccacagtcacagagccagtctctggccaaattcaagcccccgtctgtctggctcccaagtttaggcctggaagtgaaggaaaaggaaggctgggggttctgcaggggagacatcctgatgacctcacagccccttgtccttgtcctctgcatggatggggccagggacggcagtgaggcggccaccccatggggaggagatcatgtgttgcgtctcctgagtgcagacggagctgaaggcgcccccgagaatccaggtgagagcaggaacctggagagactgggaggcaagcacctgccacgtgggcacctgtgagtgaaccggggagggacagggccccaaggagtgggtggcacctcatgctggaagtggggagcaggcagagtgatggggcaaatgacagggagccgggcaggtccgggagaaggggtgggggagggagcacccttgggagagtgactgtgatgggctgtgatccctcaggcatctggtggagaatcaaaggcgagggctggagacacagcagctcttgttgagtgacaagttcccagcagagggtggtggtggggacagccaggggtgtcagggaagaagaaggggccttaggggaagggcacctgcttggcatttcggagctggcctggcactctacagtggttgcacaaatggggtgtggatgctgaagttctgccagagtctagcagggccggggtcatcatgatgacctggatgttgcagtaaggaagataaatcctggcaagaaaccgcatgccacaggtgagcccggaagtgtgggggaaggtggagataaaccctcctgccaatggcagtgaaggagagtttgaggaggcgcgggccctgttggggggccaccccggcatctgccacatctgttgttggagtgtcatctgttttattttagtcgccattttgcatcagggtcagctgtgttgactcagcagagaaacaggtaccacgagtcatccagccatagcacggctgggaccagcgcttgagttttcttgtctcccaattcaggagtcttttcctgaactgtagctttttacagttttcacatagaagtccttgattaacactctgaatttaaattttaaaagagccaccttgatcattaaccctttgagggttcagagaaacttctagaatgaaacatggtctgacatggacaacatacaccaataggcttcttctgtggtcccctcgtgatctcagtggcctcccgagttgggcaagactcagcattggttaggatcaggtacagaaaggaaatcagaaacaaatcgtttctgcaaggatttaattttatgtgacgtgaaaagtgagggatgctggactcggttccaccttgtcacccccagtaggaccaggcctgctggatcaagaagcctcatcagcttttgctcactggatggttggttcatcgacttgaatgatttctgggtctgtctgaagtcggctgggcagatgactctgtctggtttcacgatgagcttagggaagagaccagtgggattttcaggaccatgttgggagagtctagctttgcatttatttactggtgatcatcacaagataccaatttgtaaaaacacaactaagtacacactggtcctatctggcctccgtttatcttgatggcttggccatccagtgacagtgctggggtgtgggacctcgtgggaagctctttgctgctcagaatgcagctttctgttaaccagtggtcacagactcgggaacagcaggggctctatgagcttcagtcgattcaggatacgtgggctcacgttagggatgtgtttagtcctggtttgcaaacagcctgcgggcaaatggtctgtctgtgcttgtgatggtccctgcacttcttccggaatgcagccctggcccccgccagctgctcgagctgtgctgcacccctaggctccctccccagcatcaccagggccaaggatgaggagatgcaggagccagggttttggcagttccctgttactcaggtgggcacactcattgcagtaaatgttgatgtataaagacaaggaagggtatccccatgatcgcattttgaggtttttcctccaattgtttctccttgcacatgtttgatgtaatcgtgactatagagtatttgtcttgcttctttacttaatgttataaagcattgtcccatattattgaaatattcagaacagtttaactgcttgtagctgctgcgtcgtggttgttgcgtggtttgtttaatcatttccctctcattggtttcggagcgaattttgggctttctgcaatggcagatgacacagcaccacacaccctacatcccatttccccatcttgcttccggtttaggtatggttggttcctggaagttgatgtactgagctatgtagatttttccgacttttacatgtggtaaagaaggtagtgccagcgcacgctcgtacaggatagaagtgtttttgtttagggcagggacagacacatccagctgccttagaatgggggctctgcacaccagaaagaccagctgtgtaacgtagagtgtggactttgagtgatgcagtatcagtcactcaatcggtcttgtctgtgtgactctgaatacacagactccgggcacttcccaggctggcagtgctccaggcacgttgttacagtcgtgctgggagggtaacatgtctgaaccccatggagcgaggacctgagctctgcagttggtgttgggccccaccctgccctgggcgcctctcttcctgaggcttggggacggtcctctgccctcatagtttgactaactccagatatgttgagagaggagagaacccgtgacaggatgctgaagatcagcaactcccgtgtcctccttccttgcacagtcgggccacttatgtgtttactgatcctaggccacagagcttcggcgtgtggtctgggcgctgtctgtcctctgcatggctttggtaaggagggcaggcagcgctcggtgacagtcctgcagcttgaaagaggcggtgtttttgcggaacagttattgacgatcttgtcagtcatttcattaaaacggttttcagcatatgtgtttctcatctgcaggtgtgggacccaagacacaagtgtgttggggctccatgtccaccccacgatgccccccgtgccccttctccgtgctgtttcctagggctgtgtcccgggcagccacccctgttcgcgctggcgcttgagggctgagatgagcaacctggtaaaatgagttcctggattgtttgcttgcatttcataaggaaatgtcttctctttgggaggtgtgccccaccctcacattcctccgtggggccaagctctgtcgtaggttgttagagggtgggcacctttgcttttcctcactcccctgctcggaggtcggagggcaggcagcctggccattcctcctgcgcacagtggacatgcttgttctgaagcgagagcagactggggagaaggaggaggggctgagacgagtctctgctgtccttgtgccgtgtgttcgcctccaggcctgggtttcttttaaatggtgggaatccttcatgatgcctgccctccaccacccacacagctaatgaaaggggcttctccgtcatccccgtcctggccagcagcctgactagaaaaccctgatgttgggtaaactggtctccactgtggaggtcgaaatttttcttgaatttggaaatctttgtttgagacttccggcattgtttgagcagcagtgctgctttagaatattatactaacttctcaatttctcctttttcttgccctatcactgaacctattttgaggaaataagacgttattttctgttcgtaaaggaaagaaagagcatgtgttgaagaattacattaagaagcttgcttaggctgggcatgatggctcatgcctgtaatcccaacactttgggagggtgaggcgggaggatcccttgagcctaggagttcaagagcggcctgggcaacacagtgggactccactacaacagtttaagaaaagaagttcactgaacttagctaccctgtgttactgatgcatagcctctttgaatattattctgatgaagacggtgccatcagatggttcctgcagtgggaattgctgatcagctaaatctttttgacagcgggatcatgcttatggctctgaacacgtggcatttggttttccattccgagttacttcacttagaataatggcctccagctccatccaagttgctgcaaaagtcatggttctgtcctcacggctgaggagtggtccttggtgctgcctgccccatgcgaaatggcagcagcctcatccccccgcccactctctgtcgtatttgtctctgcgtcatctgccgtcacttgccacctctaatgtgtgcttgttcatttgcctgttacctgtccttccccctagacccttaggacagggcctgggcgcgcgctggcaatccccacatccctgtcgcaggtatcagctgcgtgttgaatacacgggagcaaagtagaccttgcgggcgagactcctcccagcatggacggtgtacttccacagcgttcggtggctgaggtataaccctgcagagcatgatgtggactgctttcagcacgtgccacagactgcccttggggtccagtcatcggtccatgggaaccatgtgtgtgaccagctgggcttggtctgtaagtctggggacaccagaggaagaagctgttttggagatgtgcgggaaggaggaaagctgcagatggaggttgagctctgagctgtgagctcatggagagtttgattctccctgccgtgcgccaagcttctgctcagagccttcctccctcgctcagagcctttcgccgcccgcgcccttttttcttgcaacctctcttccattccctgctctcagagctgtggcatcactcatgagaacgccccttgttttctaggatccctggccgcctgaacgacaggaggacgcccctgggtgaactgaactggatcttcacagccatcacagacaccatcgcgtggaacgtgctcccccggggtgaggcgcgggccgggccttggggagggaggctatggccttgagtgcgcggggagccgactctcggacatgagaggagtcagataggatccgtgagtgcctccctagtgaggaagacagtgggaggggctgaaaagtagaaggcgaccacctaaggaggtgtctgcgagggggtgagttactgcacgccaggttctcagaacggtggtgtggagagactgcgtgtcagcgctggccctgaccggtgcacagcccttactgcgcaccggcggcttatcttcagagtcgtcggcattattcacactggctggaaaccagaattgctgttgtaagacttgtttgtattttttattgattggttgatttggggtgtttgttcacatgtacgtatatgtgcactgtgtgtgtacatgtgtacatgtgtatgcatacacgtgtgtatatgcatatttgtgtgtgtgtatttgtgtatgtgtacacctgtatgtgtgtgcgtgtatttgtgtatgcgtgcccatgtgtaatgtatctgtataggtacacacctgtgcacacacatgtatgtatgcatgtgtgcatgtgtgtacatttgtgcacgtgtgtgtatgtttaagtgtgtgtacgtgtgtgtttaagcgtgtgtgtgtgttgctgatgggagatatgcatattagtcccaactttagtaatttttgatagaagtgaatttgtgtatttggctttaaatgctagacacaagtcactgtagactcctttttatcttttatctgccctcagatctcttccaaaagctcttcagacaggacttgctggtggctagtctgtttcgaaattttttattggcggaaaggattatgaggtcgtataactgcactcccgtcagcagcccgcgtctgccgcccacgtacatgcacgccatgtggtgagtgtttcaggatcctccaggtgccgtgctcccccgccctccgtggcactgtgatgtcatggaattgcacggagctgggcagggaggccccacacctaacttggggaccccgtgtagcattaacaagtgaagctaaatgcagggctcccagagatctccacacagaggagtgggggtctccttcagagggcagaagccttggagggccttttaggactgcacgggagcagcggccggctgaagcctcacagctctgcaactcgggagggtagcactttgcaagagagtttctaaccttttagaaaccagtagtgagaaaataacttgctgacttgaatttatgaagcacatgcaagatcgctctggagaattaaactgttgggctcatgatcaattagtttttatgcttatttctcacacacacacacacacacacacacacacacacacacaacgctcataagtgtaatcctttatgactattgattatagttctctcccattgctgagttgctactatttatacaactcctattagtagtaacagtgacaataatgtgatttgtttttagtctagacattatatttgaagacgtttggtttctttctgttctgtggctgtcctaacaagcaggtttgggcaaattctaaaatggtattaaaacaaaggaaaaatatttctgttcatcaatgggagaaaccctaacaacacaaatatttttaaaagagcgattaacgtatgcctagccgcagaagccatcatgtggcgtattttcatggccaggtttattttagctagtgttttgtgttttctttttaaacgtgtacaggaccactttccctcaaccctggaaacccagagaagcaagaaggaatctaaactcactacccatcacccactccagaaaagttagaaataatctaatttttaatgtttataataaatatttatatgcgatagatcaaaatacattatacccagcatagcacttggactttaaacagcaaaagttaaagcatgcatgatctgtatccttcttaagactctgtaagataaaatagagaaccctgataaggagaaaaggaaattgaagtaaaccatttaaataatgtgtaaataaaaccaccgcacatttatttttcacgaatccatgaataacagagctgtaaaagagacaggtgtttgaaaagcctttgcaatacttagaataaatatttaaaatgaacattttttaaaaataaatacttagagcatttttgaaagagtatattctcaaaatggccttattcctttaagaaaagtaaggccttaaatcctgtctctatttcctctaagacaggttattgtaatacatttattttaaaagaggaaggaaaaagaaaaaaaaagctgaaggggtcagtgccacatcagatcctggatcaaaaactagttcagcactgggagccggttgagcactcggagcggggtgggcagggcctccagacttgcaggttcccttaccaggaatcagtccatggaaacctttttccttctagcgtatgttttctccagatgtaaaagcacctcctatctgatgtgctcagctgcgcagagttaaagacagtgacatcacattggagtccgtggtcaaagaccagagccagagcacagagaggagccaggagggatgagcaggcgaggacaggtgcagggaggggcatgtggcaaggccggcgtggggcagccacatcccacctctccatctagaggccgcgtggcgaggccagcgtggggcagccacatcccacctctccatctagaggccgcgtggcgaggccagtatggggcagccacatcccacctctccatctagaggccacgtggcgaggtcagcgtggggcagccacatcccacctctctctctagaggccacgtggcgaggccagtatggggcagccacatcccacctctccatctagaggccgcgtggcgaggccagcgtggggcagccacatcccacctctccatctagaggccgcgtggcgaggccagcgtggggcagccacatcccacctctccctccagaggccgcgtggcgagttcggcacagggcagccacatcccacctctccatctagaggccgcgtggcgaggttggcacagggcagccacatcccacatctctgtctagagactgctttctaggactggcccctcagaagttttctgagtgccagcatttatatcagtgctgctttatagaaggtccttgtctaggcctagctgcagcctctcccagcgttgctggggctgcccttccctgcccagaaaaaaggccagctattctgcagactctgctccctggagcctcacagagccagccctcacctgtgcttatcggttgcactagagaatcatgaggtgatgtcgcaatccacagaggcccagagagcctggggacagcatcacaagggtgcctcgcagcccctcttcctgacggtcactgtggacactccggcttttctcctctcctggttctgacctccctgagtgtgtcagaggctccgcttgggctaatgtgcgcctttagtgatccagcccgcatggtccatcatcccaccacaagcagcctgcggtgtcgtgtcctcccgcttccctttcgggcgcgttcttctcctggttgttgcagggtgggctgtctgggaagtagacggagacggaggctggtgtcatgacactgctcgtgagtggagcagccctgggtcagcggtggaggggtgggcggagagaagtcaggctcacctccgccggccctggggagctctgaggatgggatgggaggtgagtgggcctgcctgcattctgcgttggttgtcagacataggccacccagaagagggcctgacagccgtgagccacctgcctgtggtgcccccagcagctggggcaagaaaaccttgatcctgaaggggatcccggcccctccctcacagtgtcttgctgtaagagaaaatctcacctgccttacctggggctgctgttaccccagccccattttgatggggcccttgggagcggaggaagcgcagtgcagaggagctcttccacaagcgcacagcccatttgcaagaaacatgtttcctctcctcatccgggaaagtgacacttcccggccggctgtgcagagctcgtcaccaggccctgctgaggcctgtggcagtaaccgcaggtctggactagaagagagcagccagcggcacccggccactgtagcggtcactggtgcagccactgccagcagccagggcctccggcccagcccaggtacagcggagtgaactgtgttcatgtagaatcacagcggcgatgcccttaattgctaggctggggcagggaagcaccgccctggcctcctcctggtccctggcacccttctgccgggtgtcactgtgtccccatggttgggtttgacggacatcagggatgaagactgaagaagaaccaggccaggagtggtgaagggcagggctcctccagtggggtgcacagggtgggcccccgtgccgtcaccgctggccactgggcacacctgtgggctccaccagccacacagctagaactcgccctgctgttgccgatggcctgggtggctttggggtttcaccttcaaccggcagaagaaacattatgcgcttgaatttttttcctttttcttttttaaactcacacctgggcacgcatctgcgtactgccctggcgactgacgtgagcatgaagggagctttagtcagccgctcggcccgcgggaaggaagaggcgagcaggagtgactcacaccaggctcgggctccaggcttcctggcaaagcagtgaatgtgaacacccagggggcagctgtgccaaattgaagctgatttgtgctgaaagaagaaaacctcattcacagattacagaccagtcatggcccttctggtggacgcgtctccctctgcttagtaataggagttcctccagcgccacttgtgggaaatagaatttgaaggtggaaacagcactagggagggcactagccatctaatcctgtgtgacagcagtgtcgctgcagacttggcagctcagaacagcacgtggcctccagatccagttcctgttgtggggctcagccaggttctctgtgcagggtcccatcaggttaaggctgccttcgcagttgagaccacccgccgtccccaccagtggggtccttagcttggcctcccaccactcagagccagcgcaggagccgggtgctgcatcctcacctagtgccacacacagtcacagcagccatcaccgttgccatattctgctggttgaaagcagtctcaggtcccacctgcacccccagggaggggccacacctgggacaggggtcctggggccacgttcaagcctgtccacctcagctggtgaactgtgctggggtttggagagggtgagagtaaagtcgcagagcccagggagcaatctgaccacagctcccctgaggcacaccagtcgcggcgggtgaccacaggtggtcatgtaagaataggaattccagtgactgactgattaagcgcctgctgcgtgttgggctttacaattgttaggccatctccccctcacagcaggtactgccgcaaagctacgatttttactatcaatatgcccattttactgatgagaaactggggtgtgtgaggacctgcatggtagggccaggctgtggctctagccgtctagtgccagcctgccccatgctgacttagcggcgtacgtgctgagtcatgggatgtacgtgcatgagcttctgtttcaggcgcatccctgggacaggagtgcacccaggcagaagtggtgtttaaccagggaggaaagctcttgtcacctcttgttacacatggccactgtgctggcggatcacagcatcgttgtcagcgtgaggaagcttccccggtgtctgaacgagtctgatcaggcagagacgagcagggagtggcacttagcgacctgctgtagtcatgctcctgggagcatgctcctgagaccatgcgaggtctcaggaaggatgtgcgcctcatatgagaaacccgtggcaggtggcattccttgcattttgcagtcagctgcatcccacctacagaacagagccctggggttttccctccagctggacatgagaagctgctggggagtcagcagccctgtcctgggatccgagtcgtcttggtgactcccacgcttcgatgcctggccgagacccgcctggcttgggcctgcccttggttgggacctcactgacctgaggcccctaaccccgacccctgccttggctttacggcctttacagtgctggccccggtggccacccacctgcctgcccaccgtgctcaccctgcctttgaatgcccagcctctttgccccacaaccaatgtgacctggcttaggagcatagctgaagcaggtcgctaaggaaaaaccaagcaacgggactaatgggatgttctgaaagacaaggacaaatcaagccatttgtcagaacattggttataagagggaaaatttgggaataactctactacctaacagaataggaacgtaaattcagaacggatacttaaaagaaaatgtaagcagtcttaaaattttattcatgagtatgcaaaatatatgttaaatgagagaaacagaacaccaaattgcatcagcaatatagttaatatctatgttaaaatacatagtacacacagcaataaaacactaaacagatttataaataaacattaatgatgcttgtgccagggtggtacaattggagtgatggttctccattttaaaaattgatagatattactttggttaattaaaagtctgcctgtagattttctaagccttcgaagcactaaaagcaatttttaaaaatagagtctttatggctaaggcattattgttcataaattcagaactagagacacacagaagaaatcattacatacttctttacatgaggagaatcatgactggtagagtggcctaagaggcaggcgtgggggctttcagacagcagaaagacggggctggtgtccaggagggcgcgggcatgggtagggcagcgcccgggctgtgctcagtccaaccggggctctgcggggcggttttggcccacagttgccagtcatagagtagccaaaagttcatattttcatttttaattatctgattattagatgttgatatctaacgtggcattaaaaaacattctgcgagcccaaccagacacatccaacccgacacatccaaccagacagcggcctgtagcctgcctgttccaagctgggccatgaacccctagggacagaggcttcagtgaagccctcggtgcctcggctcccagcatggggggcggcccgtagacatggcagtgccgcgtgcatggagagggcggcgtccacggcgacttgtggccgagtctcaggatgcttcccccactcttcttcctcagcccctcctgtgcgtgtccaagggtcctctctagttagggatattttctgcaaggtctgacatcgtgtcttcttgtctttctatgctgggaagtgccaaataagtaatattaaagggttctttgtacagaaatcaatgatgatgtgaattcagggagaatcacttgcattttacacatgttctctggggtaggttttcagcaacaaggatgccagcgtgaatctagagctaaaaagtaaacacgagtcagttccatttaatgctgaaaattatatcatgagccaactttgatagggaattgaatgtaaaaattgggctttagatttggagaagatcctagatcctcgtaggagaagaaagactggaaatgtggtctggctggtcaggagccgggacagcaggtcccacgctataggtgtacacagattctccccgctggcttctctgttctgtggcatcttcctggtttcctggagtcagggcagctccactggcctcagtttccagagaacaaacctgactgaggtggacttgccaccttggccactgaccagttccgaccccgccccgccccaactccagctccacccagttctctcatttcctctcctctcactgccaccaaaacattatgtcaaaaaatgggggtttctcagtctgtatcagttcactatgtgtgcagaaaatttatcggaatgactttaacggtagtagaccaccccccaattctgagtgctgacagtttgtaaaaggccctttccaggtgctctgccaaagccactcacgcacggccttctcacggcgtcgggctgctgcgccccacggtgcccccgcgctgggccatcttgcacgggccgctgctgtccagtggcttcgaaaggagtttggtagttgaggtgagaccgcaggtgcgctgctccagtggcttcgaaaggagtttggtagttgaggtgagatcgcaggtgcactgctcctcaggaatggcagaggcttcccatgatggggagcatcattttcatcttttttttttttttcggaggcggggtctcgctctgtcacccaggctggagtgcagtggtgtgatcttggctcactgcagcctcaacctcccagggtcaagcaatcctctcacgtcagacccccaagtagctgggactacaggcacacgcccagctaattgttttgtattttttgtagagatgaggtttcaccaggttgctcaggctggtcttgaactcctgagctcagacaatcctcccaccttggcctcccaaagtgctggaattaacaggtgtgtgccaccgcgcccaatagggaacatcattttaaagcagctctttgcttcccagcggagattccatagcagccgtgtgttgttccgatgtgtgttttcccaaatgcgctacacaattaaggtgcttaggagggaggagaggcaagcacagaggtttggcttgcactagctccacgtccttcccgggtttcagaaaggcatgtacttgcccttgcactgcccagagaccaggccccagcactgcctcctctccattccccacggaggctgagacgattcctcagtccatgtcaccctgagaaaatccccctccaataaggcatttgattctgtggagtccgttattgcagaattttacctccactctgtcctaggcgtgttaacattcgaagtctaattctaactcttagacactctcaccacgtccttaacacgagtgagtttactagtctggacacaggagggaggcttctggaagactgggaaaccccaggccttcttagatatgagcagtccttgctgctcgtgatgaatttcatgcatgactttatcactgtccatcggaatcccgccgaggctctggaggcagagatgtcagatctctgatgacagtgaacttccacagagggcagcagcatctccctgtgtatccttgtgtatcactatgtatccctgtgtgtcactgtgtatccctgtgtgtcactgtgtcactgtgtatccctgtgtatcactatgtatccctgtgtgtcactgtgtatccctgtgtgtcaccgtgtatccctgtgtgtcaccatgtatccctgtgtgtcactgtgtatccctgtgtgtgcctgtatgtcaccgtgtatccctgtgtatcactgtgcacacagtaaaatttaacaagaagccagtccattccaccatgttaccatgttgcagatttagggaggcgtaaccacacagacttggtactggtcttgattgtggagggcctttatgctgagccagagatgaggaagatgttggtgcctggctataagggcttgagccaggtggatacggagggcatgcagccaacaccgctcttgagacaccggctgggttagtgtggaaaaactccattgaatggtttgcctttctccctggaggtagttaggtgtactagttgaaacacccattcattgggaacccgtgatccaggggctttacaaatgggcatgtgtgagcataggcagcataggctgccgtggccccaggtgtcagggtgcaggcggctcctgtcttggaggcttccatcccccgtggaagctcgtgctggccactggagcaacattcccgcaggtgggaaggccgcgaggagtggacgaggcagctcaggcctgggggacagacttggagctcacatgcccatcgcccccctgtcctgtggcagtgtctggtccagcctcatccagggagggagggaatgtggcctccaccttgagtggcatgtcccagctccaatgctgttccttaacaagggcagggagggaggcacaaaggagtgaggagtggtttcagacgctcagacggagaacattcggctcagaaacagaatcgtgctctcctctgttactagattttgccaactgcaactgaggactgagctgctgtggaggtgggctcctcaccatgggagcatcaccgggggctctgcagggctgtctgccacgaaaacaatgcccagagctctctcctcccctcatcaatagaccaaagtgtgtacatccccagggagcacacaggaaagatagcagaaaagagcatttggaataaataatgtacaatctagctattatactccttgggtggtgatggagaggttgaatttttagcaagaggaaagagggaacaaagcctaacaaacattgaggttaaaacatgaagtcatctgcatttacactttgcttcaggccgcggcagtaatgaatactcagagccggctttctgtttaatgtttgatgcaaagtcaccggggagtcattctccttcactttcaatttcaggggtcctgaaaccctgcgtttctctgcggtaataacccgtgctttccgttcccggggcgggcgcgctctgactgatcagcgcagatggaggctgtgcggacttggacttggacggttttcctccagcccacctcctgggcacccgccatctcagggctgtttcctgaaaacccagctcttgcctggatgacatgttttccaggcgagtgactcatcagaacagccaacagcttagaaagtccctctgcccccagctgctgggggggaggagcccacgatgcagatgagctggtcacagctaatcacagcctcctcccctcagatctgcactccagcactccagccctgcttctccaggcagcttgatcgcaggctgtgggaagtgctaatccagacaccttcccggtcccctcccaccttctgctgtcgtgtgctgccaaacctcacagggctggctgctgccgccgaagcccaccaccatggcctctcgtgtgtacgtaggacccactttcccacttgtctttagctgggaatcccaaattagagctgcaagtgtgtgttgattttaccgtagaaaatgcagccagttttaatcaacagataaatgttcattagagaataccgttgttctgctgtttaaaaggttgccgtgcaggccgggtgcaatggctcacgcctgtaatcccagcactttgggaggccacggcaggcagatcacctgaggtcaggagttcgagacccgcctgaccaacatggtgaaaccccgtctctactaaaaatacaaaaattagccaggcgtgtggcacattcctgtaatcccagctactcaggagaccgaggcaggagaatcacttgaacccgggaggcggaggttgcagtgagccaagatcgcaccactgcgctccagcataggtgacagagtgagactccgtctcaaaaaacaaaacaaaacaaaaggttgccatgcgattttagaatttaatgggtaatctggccctgtaatttggttaaataaataaataaataaaccacccacggccccgagagggcctctggcttgctcagcaggcggtgccagggtgcaagctcctcccagtacctccgtcttccctgccttgctctgagtggggctgtccttcgggcccaggccgagctgtggcttgaggttcagggccgcttcactgtgtgctgataatcgggttccagcgcttgtctttcagcggtttgtaggcgttcttttacatcctttcttctcattagtacttgaacaaagttattttcctcctctcatgtagacagctctgcctcgagtccacagccctgggtagccggacggccccgagcagcctccgtgcatcgtctgggcgccgagccacagcccttcctcctgggctttgtgtcatccccgcagcctcctgagcctctgtgcatcagtgaaaccagaaccatctggggctgcttttctggtctgaaatgtggagctgggtcagtccccgcctcccaccccggggctggatccaagtgggcccccagccttttaggagcacatgtcccactgcagcaacatgggtcacgtgtccgagagagattgtcacccgtggctctgacacagctttgctgggcggcatcctgtccggtgtgctgagcgatgtctccagtgcagttcaggccttcaacaccaagcgagggccttggagaacgtgcgaataggctttccgggaggcatggttccaaaggcgccttgcccagcactgaccgaggccacaccaggtgccacgctggtctgctcggcccacggcccggacaccctctctgccctcctctcgcctccacctcccctaacttgcacacactttcttctaactcctgaagcagaaactttttatttgattaaattcgaggaatctttatagagtttaattgcaataattgactttgcttctgtcttaacaaagagtaaaatctccctcaatgctgctgaataccatttgcctgcagctggggatttactgggcatatgggagctatttattgcacgtactttgaggccttttgattatctcctgattgcttcttaactctgttggcaggggaagggcatgtttgtgcaaagagggccagtcttgggaaaattgaaatatatttcatatatttgaaagtgaaaaattgctctttagtccctttgttcatcttaaacttttacttttttttctggattttaacatttttcattctcattttggtcctttactaagacattgagaaaatatgccctttgacacggcagcacggagtgtcattaacctaaaaaataacacagagtcctcgagtctcttagaaaattacccaggagaagagagcgcagtgctagaagcagaatccagtatactgatcatcactcggtttccacaaggaacatatttctagcagaaagggagagtagggctgaagggattgctgtccttcctccatccctacgacgaaggttgagtgtccctaattcaaaaatccaaaatgttccaaaatccgaaactctgtgagggccaccacgctgccacaggtggacagttcccctcccgaccttgcgggcgcaaactttgtttcatgcacaaaattgtgtaaaattcgcttcaggctgtgtgtgtaagaggtatatgaaacatacatggagtttactcttagacttgggtcccatcccctgatatctcattatgtatatgcaaatattccaaaacctgaaaatatcggaaacccaaaacacttccggtcccaggcattttagagaagagatactcaacctgtatccgcggagatcaagactgtgttctgtggctgtgctgagagcgaggtgatgattcacttccagttgagagttcatgttggatgttgtggcggggccacagcagctgcctccgactgacccctgctttgtgtcagccgctctacgaggacgctgtgagggaggcatgatcataagcccatttcacagatggtgaaacggatcctagagagagagccacgcgcccagagccccagagccacacgctgaatttcaccaagcagcctcccacacgggctccctggtcaggccctcatcctccgggcgaggcagcgaggcaggcaggtcagccgctccctgggccggagctagtgggtagcagagctgggagcagagcccaggctcatggctcccggtcagatcttttcttccctctctccttctcgaaagtcacacggggctgctcatgcacagagggtgctttcctgctcgccctcactctcatttagccaatgcatattgaaagcctgctatgtgcctggcactgggaaagaagttgggtacggctggatgccagggcacctgcaggatgtctgtaattcagcgtgtggctctgcggccttgggcgcgtggctgtctctctagggtgaaacagtctcatgatcatgtctccctcacagtgtccttgtagagcagctgacacaaagcaggggtcggtcagaggcagctgctgtccctctgccacagggctagagatgtcagaggtgctggggtgtgccaggcctggggtaccacgagaaggccagagccacagaaaggcttaggggggctgtgttagagcctccgagaaagctcacagggcagctggcctggagggaggtgccggcagaggggcccattgggagggggctgttaggacaacaccgaggctctgacaaggccatgtcaggaaagtggcgatggtggctgggggtgccccataaggctgttgcctacacctgggaatcccaggaactggcctggaggtgtgaggtccaattcagactgccggctgttcctacagtagaattggggtgtggagctctggggagaggtgtgaggctattttaaatagcgtctgggggtgtcggtgagcaggtggcattgggcgccctgagcaaggatgagagcaggcagggaaagggctgtggaagctgcagcagtgcggccctgaaggacggggtcgggagcccggggaggaggctgtctcacgttcaccgtgacgggaaggaggccggaggagaaagcctcataatgtccaagggggagaactcaagagggacagtgtggtcggttactgtgacaaggggtctcgacaggggaagcacatcaccggggtcatctgtggagccactgtggcttggggggagcagctctatgcatggtaggagaccccagactgcagggtgcctggtgagacccacagggaggcagcaggaactgactgagcaggtggctgtccacaccagggagcagcaggggggaggcaagggagggacagggaggggcctgacggcaccatcacagcgcagagctcagccctgaccgccaggactcctttccctgactgcatgccgacccctcctgatgaggcactttgggcctggccctggtgtctctcccgcgtccctccaggacgctgccccatcagagcctgcgcagggaccacagctgcttagaacacgtgggctgccagtacatgggttcaagtcacagtcagaagccacagcagaaaatgggaagcattcctttatttttccaggctttttttcttattttattttaaagagaaaaaatgtgacaaaatggtgaggatgctggcagcgccagcgttcccggcctgcactctctcctggcctcccctcggacgtcttctgcagcccaaatctgaacagcagtgaaaccgtaaacatgccccccaccagctgccgtggcctccgcccagacccttgctgcccaggctcagccggctcctcctgtgccctgtgaagtggcctcgtgtggaagcccgtccataatgctcagtggatttcctctgttctctccgcaggcaagcctgggacctggctgttgacatctgtctgtctcagctgccgacgatcatcgaggaaggcactgcgtttcgggtgagtccctccaagggcaccctgtgcatccgcggcggcagccacttctctgggcacctggactgcaaagcccccagactgggggtggtgcccaggactctcgggtgtcagattttgttcacctgcctggaaaaaatgtagttgccagagtttaaaacatcgagtcaaccagggtttaaagttaaactttgaaagaatcaacttttaaaacagtcctatctcaaaattttgctattacagatctacttttcttaatgcggactcactccctgtgagtggtgatcctgttacactttctagccttttcaccacagacgcgttgtggatctcccccaggcctctgactctcagccctgtgggacagtgacccacggggggtttggtgctgaaccctggagggcgttctgcccccggccgcactgcacgggcgctggagagctgagccaccctacggcggaacctgggtttagtcgccgcacctgcaagtgagggtggccccgggccttcgcggcagctccctaggaccccctcgtggtttcttaatgagcttttgccttacgtgaggcgccaagtctgaaaatagataaataagacggaggccctgccctccagaaacccgtgaggaaagaggagcctctcacatctgtgcagaatgcaagggagcaatcggcaagagggcgcggcagacacggggaggccagggatgggggaggcggcagcctgggcagaggcaggaggggaccagcatccccgcctcccgttggggccacacctgagacaccaccgtgtcaggctccagagccacagagcctagctttgccaccgagggcaagtttggtcgtctcctcatttaagggagggattatggtggtatccaaccccaggggtgctggaaggacaaagggagttaatgtaagaaaagtgctttggacagagcccagcacagggcccttgggaattcatgtgcaggcactgccccagagccagctgtcactgatgtgaggatgccaccctccagcccagggcaggggcaccgatggtcaggaaggttccgtccactgcacagacttttaactttcagtgcacaccacagccgtcagggaagcttttaacacatgcagtcgggagcctgggtgtgcctgcgtgcgtgcgtgtgtacgcgtgagtgggtgtgcatgaggtgtgtgtgatgtgcctgtgtggggtgttttaactcctcagatgattttgacatgtcccacgggtgggatgactgggaaaacggccttttaagagggctttcttttttataatcttctgttaccctcccattattgcttgatttttttggtaacatttgattgtgaaaattttcaaacctacagcaaagttggaagaaatttacagtgagcaccccatgcccaccacttacttctaccccatctttgtattcatggggtattttcaagggcattgcagaccgccccgcattttacaccgtgaggcggaagccagctccccgtcatgtgcttggcatcaacactgggcttctagacaaaggccttccctcccttcctgctggaccacaaaccttggggggcaatgacagggtctcctgcagagtggcaaaccttcacagacgccagctgtccaccctcagcctgccagagctgctttcagagtgcctgcgcttttccgaagagctctgggcctgttgccgcaaacagatatttggaaaccttcgggaaactggcctttctgtactctgagcgtggcttcactcggtacttttaagagatcagaataatctgctcttatataaaataatgcagtttctatttgcatgtgtgctctttctaaacgaatacttaggtttctgtgccaggtatctttgccaagtttcttttcaaggattttactctatctatgctaaacaactagaatcaatattctgcatttgggaatgatttcaccatgttggggtgtcaggacaagccggggataactgacgtggaccacacactaggttccttttgtttttaatcttattggaggtgtaacttacatatagaaaagtgtacacatcatacacatacagcttggtgaatgtttcaagctgcacatactcgtgtaatcacacccaaatcaagcagccccatgagccccctcggcgcccctcttagctcctcccttccccagcagtggccgctttcctgcccagttttgtgcttggatgcgtggagtcacgcagggtgtagtctttgtgcctgcccgctgtcactcagcattgtttgagtaagctcactctctctgcaccgcagctcacactcaccgcacggcagctcactctcaccgcacggcagctcacactcaccacacggcagctcactctcaccacacggcagctcactctcactgcatggcagctcacattcaccgcatggcagctcactctcaccacacggcagctcactctctttgcaccgcagctcacgctcaccgcacggcagctcactctcaccacacggcagctcacaccacggcagctcacactcaccgcacggcagctcactctcaccgcacggcagctcacaccgcacggcagctcacattcaccgcacggcagctcactctcaccacaccacagctcactctcaccgcacggcagctcactctcaccacaccacagctcactctcaccacacggcagctcactctcaccacacggcagctcacaccacacggcagctcactctcaccgcacggcagctcactctcaccacacggcagctctcaccacaccgcagctcacactcaccgcacggcagctcactctcaccacgccgcagctcacactcaccgcacggcagctcacactcaccacacggcagctcactctcaccacacggcagctcacactcaccacacggcagctcactctcaccacacggcagctcactctctctgcaccgcagctcacactcaccgcacggcagctcacattcaccacacggcaactcactctcaccacacggcagctcactctctctgcaccgcagctcacactcaccgcacggcagctcacattcaccacacggcaactcactctcaccacacggcagctcactctctctgcaccgcagctcacactcaccgcacggcagctcactctcaccgcacggcagctcactctcaccgcacggcagctcacactcaccgcacggcagctcactctcaccgcacggcagctcactctcaccgcacggcagctcactctcaccgcaccgcagctcactctcaccgcacggcagctcactctcacagcacggcagctcacactcaccgcacggcagctcattcaccgcacggcagctcgctctctctgcaccgcagctcacactcaccgcacggcagctcacaccgcacggcagctcacactcaccacacggcagctcacactcaccacacggcagctcactctcaccacacggcagctcacaccacacggcagctcactctcaccacacggcagctcacaccacacggcagctcactctcaccacacggcagctcactctcaccgcacggcagatcactctcaccgcacggcagctcactctcaccgcactgcagctcactctcaccgcagggcagctgacactcaccacacggcagctcactctcaccgcgccgcagctcacactcaccgcacggcatctcactctcaccgcacggcagctcactctcaccacaccgcagctcactctccccgcacggcagctcactctccccgcacggcagctcactctcaccgcacggcagctcacactcaccgcacggcagctcactctcaccgcacggcagctcacactcaccgcacggcagctgactcaccgcaccgcagctcactcttaccgcacggcagctcactctcaccgcacggcagctcacactcaccgcacggcagctcacactcaccgcacggcagctcactctcaccgcaccgcagctcactctcaccccaccgcagctcactctcaccacacggcagctcactctcaccacacggcagctcacactcacggcgctgcagctcacattcattgcaaggtggacaccattgagtgtcccaacattcatgtgtcccttctagggccactgggcattttcagttttcagtcctcactaacagtgctggctagagccagactctgtcacatcagagcctgagacaaaagggaattctgtgatattggtcctccctttgaaatgtcgatatcttcttcagtatggatttttgtattaatttttatttttgtaaatattgcactgaaatatcatttgtcttgattactgatttttttttttggtaccccacctgctagcaccaattctgtgcctgaggccaaggcctccccttcctggctggcctcccgttcaggggctgctccctccttcacatttctcggagtgatccttcggggtcccagggtttgcccatattcagctttaacagatggtgccagagcactctgcaaagtggctgagtcagtttacactcctgcctgcagcattcgagagttttagttgctatgtatttatttggctatgatggttcagtatgaaaaggtatttccttaagagctaatcgtgtatttacccgatggttaatagagcattgttctatacttgtactggccatttatggttccggcttttggtatcctgttttatgaaacctttatttcctctgagatgagcattctgagcagacgctacgctctttgtcagctagcagcttgtgtgtttccctttcacatctggacctgcatctgctcacatttcacgtcccccgtgaatgctcggcttactggtggtgtttgcactgaggaccgtgtccgcgtggctccctctgttccctcctttgcaccaagggccatgttcacatggctgcctctgttccctcgtttgtccctttgctcacttgttctttgcaccaggaccacacagttgtaatgacaaactctacgtgacactttctaagctggtagactaagtcccacaacttcgtttttttccccgagtttgcctcagttacttttggtcctttgcatttccatgtgaattttaccatcagtgtgttaatttctgcaaagaacctgctggatttttgttgagattacagttaatctacagattgatttgggagaagtcaccacctctataatattgagccttctcctccctcaacgtggttgtaaatggtattgtttaaaatttcactttctgatttttctctactaacagtgacatagaaccctataaaaattgaggttttcagaggctgaggcaggagaatttcttgaacccaggggcagaggttgcagtgagccaagatcatgccactgcactccagcctgggcaacagagtgagactctgtctcaaaaaaaaatttttttttttggtttattgagatagtaggagaagccagaatgattcccctgcagtagaaagctcgggctaattgactttcttaggggtgttaaagagaacccttctgcaaactgagcagccgtacagggggatagaatgtccctacagagccgtacaggggggtagaatgtccctacagagccgtacagaggggtagaatgtccccttggcagtgaactttaagtcccctctttaagcagcaagcttgtcgtaagtggcaaatgtattgtgccattgtcaggacggagagtagccatctcagaatgtccagatggtgagaaaggcggcaggtatgctcaggttgttggtagcagaagtccagccggacgggctccacttaggtgtgacttggaggctcccagcctctcagccggccttcccattttcagtctgctgcccctgtttttagaatatgtcaaactgcctagcacacaggctggcaacagagcaaaactcctggcatccaaatcgccctgggagagccaggtatgtggtcctggccgggcaacccagacgctcagcccagcaggacctgtgagctctctgtctcgctgaatggacttcgctcccctgcacgcaggggccagctcaggagctcttcatggggtggagaaaatctcagagatttggcccaaaacatcagccctgtgaatcatgggtggagacacgggccgctctcgagatgttttccggaatatcatataaagtgttggccactcttccgcaggcgcttgctctaattcgtcagcctccccgtggctttagggagcttcacgggcttcaccgcgcacctgccaggcaaaggtgtgcttttccttttttgtcagtttgaggtgaatagtcaggaatttttctctttctgcatggagtagtgactccagcagtgaggaacatgtgaaaatccatcaggcaaagctaatgtgatagaaagaagaggtgtaactatctgaattacctgacttctgttcacagactcaagccttctctaactcaggagaattacgttctcgcgggatgtggaggagggggtacttaacgagatttttttttaaccaatttatgaataattcacacttgaaaacaggaaaatcactctgggggctccaagccagctccacaggttgccctccaagtgtgattaactttctgtaagctggctgcacaggagcacggattcctacgtggtgaatgttctcggctgactttttaagtcgggccacggggctctgcccgccaggctcctctgtggaggctgccgagagcgctcctggacttgggcgcacggaggcaccctgtcctgctcctggcgttcgcctgtccacatgtgtccacattcactggaacccggggcacagccgaccccggccagatgagcggagggagggttcctcccgacctcctctcagagacacgcacctccactgcggccacccaccttccccccgagcaaaatcaaacaacgtagggaagagaggatagtggatgggagagagaggctggtagttgtttttttttttttctttaattctttgtatcgggggctcagggaaggcagagctgtgtgttaagtggaagtgactctccgtggagggaatcaggccggactgctcctgcctggccgctcagttccgagaccttccaacggcagcctcccctgcagccttcacgctctccagccgcaggcccagcagccctgctgcccacctgctccatggcacccaggcgaatccccctccactctgtgcctgcactcacgtggctgggctaactgggagctcgggcccacccggtgtggcccacggagaactcgtgtcaccccctcgaggggccctgatgccgcctgacattctgaccccaagcattttttttggtctccctcacccgcgcgccttctctgtccagctgcaacccctcctcccgccctcaccccagagagtaccctcgtttcccatttcactgaggaaacaagaagcagtcgcatgaccgcctctgccgggtcctccagccctccccctgcttctctgcatctgggcccccttgctttgccgcctgcctggttcccctggggagcagccctgctctgccagcccagcctgtgcttccagtcccatcccccagcctgcccgaggatgccctccagcagcctttccccaccctccgtgcccccagctgggtctttctcaccagcgtcctgtccccattactccacatctacaaaaagcacttcctgaccctacatccctctccagccaccacctgtctgtcttgttcccctttgcaaccaaaaccaaattcaccctgtctcgaaacccctctggctgcgcttttgcccaactccagagcgttcttgctgctgatccggggcccagtcagctctccatccttatctcgcctggcccggtgctggtttgtggctctgccctggacgttgctccctggcgtccagacctttgagctctgctttccctccactgccgggccctcaccggccccagcgcggccccagctcatctccttggtctccatagcagaggctctgtcctgggcccctttcctttctcacttaacttgaaaaagattcacacaccatgactcccaagcgtgtccccagccagacttgcctgctgatccacacactcacggggtcccctgcccccggcatcttcactcccttgtccagccactgtcgtgagcaccacatgtccacagctggttcccagcacgctcctcttgcggccccagctcggtgccctggccaaaagccttggagtcatcctcagctgctctcttctcctgcctgcctctggtcccttcgtgcaccccgcaggctctccctctttggcatgcccagagcgcccgcttctcagccgcctggcatcctcgcggccctgcagggcgggcccttcgtgaaggcttggatgcccggcaggtggcaggggtgggcaagaccaggccatctgggaacatggccctaacaagcacctgttctgcttgccccgcagcacagcccgttcttcgccgagcagctgaccgcattccaggtgtggctcaccatgggcgtggagaaccgaaacccacccgaacagctgcccatcgtcctgcaggtgagtttcttcagaccgggccagacagccgaggttcctcaggaaggaagccagatgcctgtacagccccgggagtgccttctctctccctgagccctgtgggtctgtgacatcccagcccctctgccccgaagatgatggtgcatgggcaggtcgcattcgggcaaacggatcacacagatccaatcaggagtcactgggctgatcgcacattcattcctaaagggtttcctctaaagccattgatttccctcctccaccctcagataagtgtaactttgggactggggagtcatcagccagtccatcatccccctctcccctggctaccatttccactttaggaattgctgagattcagctacagatgggctttgcttcagagcaggctctcgacaccactgcctccttctcttgggaaggacaggagatggcagtgaatccgggagaggagggaggaggctccctgagcggatactgaccggcgaagcgggcagagcggctttgtggcccagcgccgtaggttatgcactgaagcacacacagatccggaagccggcagcccttcccttgcacggggctgtcacagctgctgtaacaaataggcccttttggggcacgtccttcagatgccagtgcccacggggcccgtgtcatgtcagtgctgttcacgtgcagaccatgacctgttcatgggttgggaggtcagcatcgtgggtcctgctggctggtttttggtcactgagataggatgggaggccatggaaattgaggagttcgtcacaggtagtgaagttagaaagattccacagaacttttgtttcggtgaatgtgtgtttgtggggaagtgtgtgggctgagtcagagtcaaaggagtttaaaatccactggtcagtgtagatatcaaggtctaagaactcactttaaaagctggaaaagtgtttttgtgattggggtggtgcagttggactttggcgaggagctgtgcatggccgtggggaggggctgcccagcagcaggcagggaatgagcaggccccgccctttttggtttaaagctgggtgactccccccacacacaggaagagccccacctccgggtgtggtgctgagttctgagagtcggcagagttgggtcctcgccttcctagaaagcagatcgggtggtggtacctccatggagaggggcgtgagtggcgccgcccacctgcccttcttccttccagagctcgtgctttctggttagggccgctcaccacactgacagacagcacaccaatcttcactagaccaggtgttcatcccacctctgagagatcatttagaaaaccggggccagtttatctctgtcacggccatggcctcagcagccttcccttccgccgttcagtctgtgctgcagcagtggcagccagcgtcgcaggcgtgctgtaggactgaggcttcacctcgttcaggactttgccccaagaatctcagccagagaaagaggagttgggagaaggaacagtgcacatggacgtgctcaagacagtaccgccggcctgtcctcgccggcattgtctcaggcgggcaacaaagaaccagtgtgccagccggctgccctggtgttatgatcccagctcctcagtaggccaaggcggggaaggatcacttgagcccaggagttcaaggccagcctgagccacatagggagactccatctctacaaaataaaataacattgtaccacatttcacagtatatatttctgctgctgtcagtatattatgacagttgctttttggacattgcaaaaagaatgcagacgttattactgttcttcctgtatgtacctagattcgtttaagactatcctgagattacagggtgaggtgtaaacaaataaaccagctcatgttcaaaaccaagaacacgcagtgatagcagcaacgcaaccaaacaacatttgacagaagcccacgttttcccttcgtgcgactgtagaaaggcagctggctgtgtggccacgggtgaccgggggtggccacagcgcaggttgcccatgctgggccccacggctcctgttggtcatctgggttaccaggatgtccctcaggagacactggctctcttactggccttcctactatttgagcaatgtgatggagtaaaatcggccctctccaaagcaggacccgatgccaagcacgttaaatccagttcttttgggtccagcaaataatctttttgtaaatggccttctgttgatttctttcaatgttcccttggccacccacactccctcaaggaaggagaagacgtgctggaggcagctttctgatggtgacgtatgcgaagacagctctggtcggagcgtggggcatttcccacatgattttccagcaggtgtgagtggcaggttcctcctccctctggagggtctgtttcctggctgtgcccagccgggatcaatgggcggacctccacctaacacaaaagtagggaaagatgaagtgtaatggggtatcggcttcatttgacgtaccccccgggagtggcttctttctcgttaactcggctcacttccccgcgctttctcttaaaagcctttatttttgccaaagcctgggccctgttatccttaaattattctctagtgccttggcaagtcagaaaacatcacttaagggaaagggagttttctcactcgcttccggttttccgaatccctgccacttcatccctaagccagaggcagtggctggtggccctccagggtcacgcacggtgtctcatcaggtccggctgattcgcagcccctcctgtaaacgtgagcatggaacaggcccttcctgctttccagcctcaatatcctctctgccttttaaaaatataaatcaacagaggaacaagaaggaagatacaatgtttaaaaaaattgctgttttgcccagacccttgattgatggtgtctatttttttgagatggagtctcactctgttgcccaggctggagtgcagtggcgcggtctcagctcactgcaacctctgcctcctgggttcaagcaattctctgcctcagcctcccaagtagctgggattacaggcacccgccaccatgcccggctaattttttgtatttttagtagtgacaaggtttcaccatcttggccaggctggtcttgaactcctgaccttgtgatccacccgcctcggcctcccaaagtgctgggattacaggcgtgaacgaccgcacccagccctgaacaccgtcttctcacgaggagctctggactctcgtggcctgtggggtgcgtttgccctctggcttcggcagctcgcccggaactcagtgctgtgtgcccccaacaggtggctcaggaagcccaggcaggggaacgaagagcgcctaggttatggaagagaggggagaaagtgacttttcttcttctttctttttcaggaaaaaggtgacagtgatatttatgtgttcatttatttacttggccctttttcttttcaatagatccagggtatacgggtgcaggtttcttgcatgcatgcactgcgtagtggtgaagtctaggctttgggtgaacctgctacccacatagtgggcattataccccataggtaatttctcagccctcagcccctcgcaccttttggagtctccggtgcctgttattccacctgtgtgtccctgtggacccgttgtttagctcccactcacttatacatgagaacatgcaacagttggttttctgtttctgagttattccactgagcataatggcctcctgtttcacccatgttgatgcaacagacacgatttcattctttttctggctgagtagtattccatgatgcacagacgctgcagtttcctcatccagtcctctgttgaggggtgatctcggctcactgcagccggagctccgcctcctgggttaaagtgattcttgtgcctcaacctccagagtagctgggatatcaggtgtgcaccaccgcacctggccaagagtgattttataggatgaagttttagtcccttttcctagatgtcacagatcagtgtgagcatttcattaggaggtctatttgctctctctccgtgcatcattttttttacaaatagaatgtggggtctgaaagtacaggattgttatcaggtgacagcagaatgacaaactagagtgatgttatacataccatgtacatcggggactccaaaaccgccctgctcatcaggtgcccgaggcaccctggcctgcagcacctggcactccagggctggaactggagaatcttttcttatgaagcagctcttccagtatgcctgtctgagcactctcttcatatacaaggcaaatgaaatttgataaccttagcaattctgttttaatttggtcgcctcagctggagtgcagtagtatgatcatagctcgctgcaacttccaactcctggggtcaggccaccctcctgactcagcctcctgagtagctggaactgcatgcatgtgccatcatgcccggctcatttttgtattttttgtagagacggggtttcaccatgttgggcaggctggtctcgacctcctggcctcaagcgatcctccagcttcagccttccaaagtgtttgcattacagtattgagcctctatgccggccaccatgattaatctttagtttgggctaccacaggtggaaaataaatctcagtaactcattcagctcaccatcatttacttctataatttccatagatcgtgggatggtccggaacaggaggtttttgttttgttgtttttaagtacagaaacaacattggctttttttctaaaagccaatcccattttaaaaataactttgctttatgttggcttcagtttttaaaaatcgtaaatcaacaaaaggtggcaggaagatgatgtaatgtttgagaaaaaaaaaacagtacttaacctttccgccaatactctttattgacgatgtttctttgcaaatgaaataattgtagcaccaaatcccatgctgcccaaggacctccgacgccgactcccaggcaggtgggcccccgaggcccccgcgtgtgtttcatcagcacctgcagctcctacagtgggacactcgggaccacatcacggtggtgattgtgaaccagcgtcccgcttgcttttgttgtttgtaaggagcacattctaaggagacctttattgctgggctagtgtcctggtaaaacagtaacaggaactggccttgattagacctcttcgccccgtcctgccactttttccatttgttctgcaactatttaccttagaaacagccttgtccttatttacagtgttggaaaaaaacaaaaagaatcagaaaacaatctttgtaagctttagatctgatgatgtctttgatttctgacgattgcagccatggcgagacctgcctcctctcctctccctgggtcatctagaaacttgagcctcaggcagcctagtgttccctacacacagagagtcagtccttaaaaccttgggtggtggagacatctggtagccgaacactatgatgctgactttacatccgctggacaccttggtgcacacagctttgtgctagacgctttacggactctgcctcattgaactttgagaataagcccaagtcaagtactgttgtctccgtttttcttgataatgatattgaagtttccagaagttaggaatctaagccaattattgggcagagatggaggcagggttaacatcaggttagccggccccagagccagtgcttttcctccgactggcccctcaaacctgagttccaggcagcagtggcatgcgacagcccccgagttaagcataggagagggatccggttccagttcacatatcctgcgagcagtcccacgttcctttcccagcctcttaatcagagactctcagcatcaccagcacggggaacctgccactcctgggtccatggtgaacccagcgtgggagctggctccgggcacatagaagggaagtgaggccacattcccactgctctttctctgcccccaaggctggacatgctgggatcccctccataccccatctgcccctccagcctggctagccacctcctcttgctgccacctgtgaccttccctgtccccctcatcctcctgccagtgctcttctcccaccacagggaagctcctccctctccacggctccccagggcccatgctcctgactcggtggctcctccgtggaagtcgtgctggccgacccccaggagcttgacccaggtggccgccatctcctctcccctcccccgatcctccaccctcactggcctcctcgtccctttcccctgcctctcttgagggttttcaaactcatcccaaaccttcttttctagagtttgctttccttcaccccttcttctctcagcctctggccagtgctgcagtctcctcctccccatctccgtattggcaccctggtcaaacccacccccttccactcgcctccccgacttccagcctcttgccaggcctgtccccaaagcgagcacactggaccagtcactgctgcttaacgtcggctggtggcttctggatctcaaaacaaactgacctctctgcatgccgtcggcggggcctttccctatccggcccctcccccatcactgacctcagtcatactggtagcccgtgcatcctcagacacccgggcttttccagcctctccacctgcaacgcggtaaccccctcatgtcacctccaggacccgctgcccagctgtgtcctgtgcatcttctcctggggggagggaaaacctccgaggcctgcagcgaggccaggtcaggggctcccagggtctgtgtgtttaggcatggtgatggggcggtcatttgtttaatgtctgtctcccaggccacatgaaggatgggtgaggtggtccctactgtctgtggtcactctcctagcacccagcgcagcacctgccccataaacaccccttggatgactggggcatcgtggatagaaatgctgtaggttggagggagtcgatgcacatgccttccagcatagccaccattaaggaaaaaatcaaaagaagtaatgccattaaaagtgtaaagcttggccgggcacggtggctcacgcctgtaatcccagcactttgggaggccaaggcgggtggatcacaaggtcaggagatcaagaccatcctgcctaatgcagtgaaaccccgtctctactaaaaatacaaaaataaattagccggtcatggtggcaggcgcttgtagtcttaactactcaggaggctgaggcaggagaatggcatgaacccgggaggtggagcttgcagtgagccgagattgcgccactgcactccagcctgggcgaccgagtgagactctgtctcaaaaaaaaaaaaaagtgtagaactttaatataacagaaaaagtatgtgcaaaacctctggcagagcccactctaacttataaagaactctgacatgtcaataagaaaaagccacattttgaagtagaaaactaaacgcatgcagggcaagtttactggggaaatggcccatcaacctgcaaaatgtactccccttgaaatccaagaaatccagatgaaaaggatgtattttcacctgtccttttggctaataatagtgtaatatgggctagtattgtcccacaagctttaaatttattatttaatttaatgaaacccttgtgggcaggtgttgtgttatatgtgttttatgaattaataaatcaaggctcagcgacgttaacttgcccagagtcacaccgcagtgagcgctgctgggtgaccagctcaggcagcaggaagctggtgcccacgtgcgtgccgtcgagagtgtgagtgggttcagcctcagggtcatttggtaacttaagtatatatgctccgaccttacctttttaatactcacatttatcttagtggaaaagaatcatgtacatgtgccgatgtacccattaggatattgatcacaatcttctttatcagagcagcattttggccaggcatgatggcccacgcctgtaatccctacacttcgggaggctgaagcgggagggttgcttgagccagaagttcaagacctgcatgggcaatgtagtgagacccccatctctataaaaaatacaaaaattaaccaggcatggtggtacatacctgcggtcctagctactcagggtttgaggtgggaggatcacttgagtccaggaggttgaggctgcagtgagccatgatctggcatctatactctagcttgggcaacagagcaagaccctatctcaaaaataaataaataaaaatggtaaaagtaggaacattttgatgataatttaaatatctatcactggggaagttgtttaaaagaattgtgtacatttgcataacggaagtactgtgccgcctttgggaataatatggtcagtacatacctactgatatgaacaatgttcacagtgcattgtttagtttaaaaaggagctgagaaatagaatcacatattatctagttcaagatcagtaagagaagtgtggacataaagaacaatgtctgagttcatatacctaaatgtcaccagtgggttagctttttaaatgcaattaaagcatgtttgttctagtattttctacattgagcatcttttatctgtgtaataaaggcataaagcgtgttttcttcacctgtctaaaagcatgaacttgtaaggaaaggagcaccagctctaggtaactgaagcagcagacagatctgaactgtggtcagaccgctccaaagctggcagctcatgcagcagcgtttcggggttgcacaccagtatggtttgcagtgataccattttcttcttgttcttccaggtgctgttaagccaagtgcaccggctgagagcattggacttgcttggaagatttttggacctgggtccctgggcagtgagcctggtgcgtgccttccgcattaacctgggggctgagggaggtgggacagagattaggctccgtgtttcagtctgtgcacgtatttcatgatccagagccacccccagccgtgagacccagggcgagtgtgtccaccgtgttggtgtcctgtcactcctgaggccctcaaggagcccactctgtacccgtgcagcctgcagtgctgcctggcgtttgggggtctggggttgtcgcccctctttatgtctgatgttagacataggagtgagtgtgttgtcggccggtcaccttttcctgagccgcccccagcgctgcggaggagcagggcgcccctgagcctgacgcagcacccacctcgtggtgctgcttcccccaggaggagtctggatcctcagcactgtctgctcaccatcatggcaggcacaattcggaaacgctcttctggttcctcattctatagcagagtagtaatggccactaaaaacaccctggcagaggcaggatcaagaagcgacgtgcgtttaacaaataactcacagggaaagtaaaaggaggctgagagggaaccacagagtcaaggaaactcgagagacctatggccagctgccatgtacagtaaaccttacttggttctgttgaagttccaaaaatgaatactcataaaacaattagaaattttacaggtgctggatttatgttattcaagaatcattgttcgtttttcttgggtgtggtaactggatcatgtttttataaaagagacctaattttttagagatagacactgaatattcaccaatgaaatcacatgacatatgagccttaatttactgtgcttgggagcggtgcggtggggcggtgggtgcggaaccgctgtcactagctgggtggtgagtacctgggtttggtgtatttaagtattttcatcagataatgttgacaaagagtggtaattgatagtccagcactgaaggacgagagaaaacatccaaaacttggaagaatcattcagcactcaccactgggccattttcactccaggtgcctgaggccacaaatagcttgtaacagagtcagggcctgagtcatcggaggaaggctggcgtgactcggtcacttggtgtgtgcgtggtggtgtcgcttagtcatcctggaaaggcctgcgtggtattgcgtgcactctaagaagacaggaagcatgtattcataacagtttagaaagagtttcatttttaaggttaattttttaaaaccagtttcttccctttaaagaattaagcttctgctcattggaaatttgcctaatacatgaatcgaggctggataaacgaggtatttttacaggtacagattttgcctctcaggtgagggcccagccacccgaaccagagaaactgctcataccttgttaaatgtggcctttcacagggaagggacccaggcctaggtcccaccaccacctcctgtcttggttacaggggacctcacttattggaaggtgatacctttaggatatctttgaaattccagcagctttgagataaggacacagcagaaacccctggctgtggagtgcagcagtactttgccaggcatcctccacactgcagtgccctccacgccctccctcccctgcctctgagggcagagagtcccctgagaatgacatggccagaactgggcgccagtgagcccctgggcaacccccgctcctccctgcctttcccagggcaggcatctttctcccaaggtgtatctgaagtgcaaacatgagtgttgagcaagctggccgtgccgtcacggagaggtggccgtggtgtcacggagaggtggccatgccgtcacggagaggtggccgtgccgtcacaggtggccgtggctcgtacgtgagcaacacagtgaaggtgcctgatgctctgctgccaagagcagacgaggccactgagggcaggcaagggccccaggcgcaagcagcctgcgcctccacaaggaaaagctgccacccgattcattccagtctcttgacaccagtcaaggctggcagtatgtggcagcttctaggaataaatcagagatgaataaatctggaggaagcccctctttactttaagtgaggcccattcattcctgttgcgtttcccatatgtgctgaagatagcaccgcagctggtcccgcgtggcacccctgctgctgcccgttcccttgctgcggcacaggtgcgctgacgccctccctcgcccccaggccttgtctgtcggcatcttcccctacgtgctgaagctgctccagagctcggcccgagagctgcggccacttctcgttttcatctgggccaagatcctcgcagtggacagcgtgagtatccccgccctcctccccagagtgatgtgaacctgccggcccttctggggatgccgagccctgcgtttccagcctgccctttctccagcctcgctccctctccaggcaccgccgttcccttcctctcttctggggtaaagtgggacgcgcccgcctcggcagccacctctgggtcgtgggggctgtcacctacctgtcctgtccctggccttcccctggtaccctgcgctcagtccccccacaccgtcctgtccctggccttcccctggtgccctgcactcagtccccctgcctgtgtctgacccccgtaaggctgtccccgtgctcctgaccctgactggaagcaaccccgccatggcataaacttggcctctgcctcgcccagaccccgcattggctctcctgtgcccaccattgcatttctccccctcctcaaccctgcacaggtggtctgggccaggccccgaggtgttaggggccacccccttacacggggctgtccagctctgtcctctctgacgggcatcagccctggccctgcagccatgtgttcgcccctcaatcatctaggccagggacccatatttagctatgttaagagagacacaaggtcagctgtccctgtccccagcggcttatgcttgggtgctggcaggggttgcaggtgacaccagccctgttgtgaggcagggtcacctcctgcaggagctaccagcgagatgggtcagaggagtggggctgagaagtcgtgtgggcgagacccggcctatgctgaactggaaacgccaggaagggccttgagggggtggatgtcgggcgggggtccaaacatggaggtggcagggagggctgggaagacatttagaggagggcaggccactccctgtggctgtgtgcggggacacgcagggaggccccatccacgcagacggtgcacggttcccggtagacacagttgaacttcatttagcaggcatggggattattacagattttggaacaaagacatcaaagaatgaagctgtggtttataaacattgcctggcctcggtgtcaagtggattgtagggaaacacggggtggagagcattttcctccaggagggtgggcagaggaggtcgggctgcagggctgggagggcggcaccaagcctgggttgggagaggcgactcgggctgaagcctgtgtggccggctggggctcggggagccttccagagacaactggtcaggagccctgtgcggcctaggagcagggctggcccgatgccaagactggggacctcgtctacccagtggtgatggcaggcgagaccctcgaaggaaaatgtggaaggctcagctgcgggagaactctcgaaagctcctcgtgtgacacagtggagaggagagctgtacagagtggtgcaaagggtctgggaagggctcatttatagaacgtgaagattctagaacaaagggtgtgtgctgagaatggagttgggggatatgttgccctctgcagggttgttggggacaaagatttcccagagatgcctttgcctttagctgtccgtgtgcggaggggcacacgtgtgtgatacagagctgggctcggagccaggttggcagggagccccgggaagaagccaagtcagtcttgctctgggggtgccgccacgggtgaggagagcgggacggaggagccggcatcagggcaaggctggctttgctccctgcttggttttgaagcaaaccagccccagcaactcattagaaggcctgtaggagcaggtccacgttccccccggacttcggccagctgctgtgtgcacgtgtgtgcgggggtggtcatgtatgtgggcgcttgtgcgtgcatgtgtgtgtggcgccctgtcaggcggctttcatatgcaaagtctcttaattcctaagtcccctgtgaagttagcttgaatttgcagcctatttactggtgaggcgccgcccacaggagggagcaggggccacatagctgccatgcgaggggccggcaccccactgggcccctgcgccgggtctggagctccttgcccacacagggaaatggaaggtctagcaaagtcacagagcaagtacaggagagtgccaagaacaccttggagaggccatggcttggagccggggaagaccaccctttccttttctgtgtggcaggtgaggggagagtggacggagcttaagcccccggggctcctgcctgctgcccggcgctccccaggccacattctgtcagctcctccgtccagtcactggcactgagacccagcctcatccttagccctgtcagccatgtcgcactggccaccaggacctgctgtgctcgctgaagctgccctgttgggctttgttcagccaaattcactgaccctgttgtccaggcactggcaggcaccccgagccacaggctcgtaccccgcactgtgcgctctcacccgtcagccctgcacaccccacacaaagccactgctgtgtctcccacccacagccgctgctgattcaagtccagcccaggccatcaggtccccaactgtgctgcccacggacccctgggcccctgctcagcccttctgctccctgcacccagccctgaccatagcctccccacaccccaagtcctcacgtactactttggtgtcacagctgaagtcagggggcagtggggaggctgctgccgaagcggacggtgagggcttccaccttggaggcaggcgtcagtcgtacccagcaccagttgacctctcgctggttccgctgattcttgtagattccctgggattttctgctagttcactggttcttgtagattccctaggattttatgtatatgctctctccaagcagaagcagcttccagcccctcttccggttctgggatctctcactctttttctgggcctggggcactgaccatggctctgctggcacgggtcggctaccgtgcttgccatctctcccagctgctcctgatttcctgagctggatgcggggagctgctgctcttcctctcagcacagctgaggttgaccttgacctcagttcaaccttgaaccctcctgggcccagtgctctgcacctggctgtgaccagagaacgctccataatggtgacctgaataccatatatttcagcaaaatattttccctgctacccattaaactacagataaagaatgactgctttgaaagattggctaaagcactggatttaaggttaaaaccctgagtttgatcccatcaccgcatttgctcttacaagtcattttcacttcccttggccatgatttgcctctgtaaaatcatgagccttcggccgtctgccttcagccacagttccagagctcagaaccaggacgtggaaaactgctgtgtaaattatagaggaacaggaacaggaccaggaaggggcaccacgtaaatctcacatctctcctgcctgtccctgttacactaaaaccttttcttgctaaacagaaagcttggctttgtggatcaggacgcgagaggtgtgggtcatttctattttactcttcttcaaattcactgaagagccacattatgtaaacaaagggtgtttggcaggaagtcattttgaaacgtggtttctgtcctacacccatatcttcgtcatctacatggacacacttagaaatatcttggcacctggccacggatgaaggaccatgtgtaggggctctgggatgcacaaaacggtgaccctcacatgacacaaagcccagggtgaagggaggaagagatgccatctgcatgcagaggtctgggattacggccgcctgagcctgctccccagcaccgccagtgctgcaggaacgtgtctaagccaactttgattctcagacttcgtgtttttagtaccttttaggacctggaaattgatgatgtctttatttttagtctcaggggtggctcttggtgaaaggggacagccttcctcgtaccttcctcgtgacattctcactgcatccacagcccatcatggtattgcagtgcagggcgtcttgtttaaaactggctcttggtcccgtggatctcccagggcctgttgctctcgagtgccccaaatggcagaacgtggccatgagcacggaggctgcagcgtgccttcgttttacaccctgctccaggcagataccagggcctcgggtttattattcatgctgctgaaggggtcatctgctcagtactgcttggggagctgttcccacagccagctgggcatgcccttgcctgcagtgttcttgtaactgcctgcaggcatcacaggccttcctgtgaattaatttcttaaccagcttgttgcacctgcatgtttaaaagcaatcattccactgaggggcattttgaagtgtttccggtagaaactgagcctcgtctacctcacctgcctcgcccttccttccatcgttaccctggcgataacttcccagagatgaaagttccctgtgtttttgaggggtcattcctctactcccttcccctccccacgtctggccatggatgttgctggcggtcctccggatctccacccctacccccccatgatgtgtgcaccccctacaatgtgtgcatgcccctctgtgttggtgatggtcctccgaagctccgcccaccatgatgtctgctccgccccctcgtgttgctggtggtcctctggagctccgcccaccatgatgtctgctccgccccctcctcgtgttgctggtggtcctccggggctccgcccaccatgatgtctgctccgccccctcctcgtgttgctggtggtcctccggggctccgcccccacatgatgagtgcctcctgcagccctcagccgtccctgtgactcctggggcttgccattgtgcagatcggggtgcacatggtgtacagacgggtccacctgtgaagatcgcagagcctgctcagaggttcagaggtgcagacagaagccagccactcccccagtgttctcagcatccccctgctgccgccagccggccctcaggacacacttaagagtttgagaaggatcggagcccactcaggctgggcccagcggaagggcgagcctgggacctcccctcatttcccaagcacctttggggcacaccgtgtgtcccattgtgccagaagctctgagggattcatggggaggccttaaagaaggtgggctcgggcggaagaaaagacggaagaacaccatgtgccaccggggagaagtgtgtgccgtttacatgagacagagcagggcacagtggtgacactgatctgacacagatggtaccgcacaggacaaggagcaccaaggggggcacatgaagaaagccgtctgtccaggattctcccaggactctgatcccagagggcctcccccagcatcactccccatgccaggttacactccacttcacactaccagccagaaattaccaggcagatagaatcaggaaaatatgacccgtaatgaagaaaaggaaatcaacccattaaaacctgctcagaactgctgcaggtgttatcattagcaggccaggacattaaaaagttagaagtctactctacatattcaaaaagttaaattgagacacggagaatataaaaagaacccaacttgaatttctagagatgaaaactgcaatatgtgatgggaagaaatatacttgatgggattaacaaccagttaagcattgcaggagaaaacagtacacggttaggcacggggctcacgtctgtaatctcagcacttttggaggctgaggcagacagatcacttgagtaaccaggatttcaataccagcctgagcaacatggtgaaacctcgactccacatgaaaaaatacaaaactcagccatgcatgttggcgcgtgcctgtagtcccagccattcagaaggctgaggcgggagaatcgcttgagcccgggaggtcgaggctgcaaagagccgtgattgtgccatggcactccagcctagggaacagagtgaggccctgcctcaaagaaagaaagaaaatagcaatagaaactaacaaaaatgaagcatggtaagaaaagaaaaaaaaatttaattaaaagaatattattccattgcgggacaacggcaagtgacataacgtactatttgggggtccataaaggaggctagcagaaaaagtatttgaagaaacaatagctaacatttttttgaatttgatgacaattataaacccacagatccacaaagcttagcaaaccccaagcacaagaaaactacacgaaggcatatcgcaatcaaattacttgaaaaacagtgagaaattcaaaagtctaaaggcagccagtaaaaagccagtaaggagcaaaggtgagaatgacggcaggtttcttcttacagatttcctacagatggaaaaggtgagagtgacggcaggtttcttcttacagatttcctacagatggaaaaggtgagaatgatggcaagtttcttctcacagatttcctacagatggaaaaggtgagcgtgatggcaggtttctcacagatttcctacagatggaaaaggcagacagcggaacagcatctttaaagcagagagagagacagagaaagagaaaaaactgtcaacctagaattctatacccactgaaaatatatttccaaatggaggcaaaataaagacttttaaagacatacaaaagatgaaagcttatccccggcagatccacactacaagaaacgtgaagtcctttagccttgaggagaatactcttcagagggaaacacggttctacacaaaggaattcaaagcagcagaaatgagtactatgtggataaatatgggatttttttctttttatttaaatcttctttaaaagataattgttttaagaaaaataataacagtgtactatgaatttttttcaataagccttttgcactcttaattttttttccttacgagacaaggtctcattctgttgcccaggcctgatcaccgctcactgtaagctcacactccctggctcaagccatcctcctgcctcagcctcccgagtagccgggatcacgggcacaagccacggcaccccacagaatgtataacatttgtaagagcaaaatgcatgctaacagtaacaaaaagatggggaggagagagaatgaagaaatactattgtaagattcttggactttgtttgaagtggtctcatatcacctgcctgaagatgaactgcagtagtccataaaccctaaagctgccactcaaattttaaaaagaattacagttaattagctgacaacagagatgatatgaagtcataaatatagacaacacggaaggaaaaagataaccaagagtagatgtaacaaatagaaaaaggcaggatgatagatggacacctaatcctgcccgtcactgcagtgtggagactgaacgccacaatgagaaggcagaggccaccaggttgaagagcaagaaaaaaccataccatggctacaagcaatgtacttttggcataaagacacgagtagattgaaggcaaaaggacgggaagagctctgccatgcaggcactaagcagaggaaggctgcagggcctatgttaatatcagacagaggaggtttgggagcagagaacgttgctaacaataaagatagacatttcataatgctacggaagtccattcatcattcatcaagagaacgtcgcagtcctaaatgtctattcacctaataatagagtttcaaaatacatccaacaaaactgatggaactgcgaggagaagtagataaatccgtaattacatttggaggtttcagtgctcctttctcagtaactgacggaacaagcagaagagaaatcagtaggaatagtggggacttgagcagcactctccagcagctgggccctgacgtttatagaacacgccacacagcagccatgcagtgcacagaggctgtgccacgataggcccgacccttggccaaataaacctcaacaaatgtaaagaactgaagccttacaggcgtgttctacagccacagtggagtcaaactcaaatcaataatagatagtaggaatgtctctaagcacttagaaacagaaacttttagataaataaatgattttcatttcattccataaaattttaagtaaattaatatatatgtgcttaatgcaaaatagaatataaatatgtaatattaagatacatagatattataagtcgtgaataacaaagatttatataaaatatttattactataagtatgtatatataatatataatataatgtacatataattataaatacttgcattaaataaatacattatataaacatgtatattaagatataaaataaataggttgagtatacgtggacccagctctgaacagtgctgagaggggagtgtgtagcagctgctagacaatgcattggaaaagagggacggtctccaaccggagatcccggcttccacctgaagagggcagcgtgagtggagtaaacccaaagctgtcggccaaaggaaatgatacaaatcagactggagactaatacgaaagaagacagtgaaacatcaaaatctgttgaacaaaacatttttttaaaaaacacatgaataaaactgtgaaacaccaccctgactgataaggaaacaaagaagacacaaattccagcatcaggaatgatagaggtgacatcatgaaagattctagggatattaaaaggatgataggcaaatatcatgagcaacttgatgggagaacatttgataactttgattccttgaatgacacataccactcactgaggaagacatcattaatctgaatagcactatgcttcttttttttttagagactgggtctcaccacattgcccaggctagttttgaacttctgggctccagcgatgcttccaccttggcctcccaaagtgctgggattaaagcctgagtcactgtgcctgtcactacaagtggaatttgtagtgaaaacttttactacaaagaaaactgcaggtccagatgacttcgccagtgaattttactgaacattaaggaagacgtatttggatgacatctaagcaccttcccatattgttctatgaggccagcattacctgataccaaaggttagacacacgttacaagaaaagaaaactacagataagtattctcttgaacacaggtacaaaaatgctaaatagaatttttgcaaattaaattcaatgctatttaaaaacaaaacatgatctagtgggatttatttcagggatgcaaacctgtttaaggattgaaaaatcaatggatgcctcttcagattattaaagaattatttttaaagagagaaaagtccatgtaatttaccatattaaaaaaagatgaaaaccatattaccatctcaagagatgcaggcaaagtattttaacaaaatctgagatccacttctgatttaaaaaaaaaaaactccctgcagactcctaatagaagggaacttcgtctacctgacaaacagcatctccacaaacttacagccaacaccatacagtggtgaaagactgaatgcaagatgaagccatctgttcttgtcacatcccttgacattgtactggaagttctaggtagtacagtgagtcaaggaaaaaaaggcattcaagttcaaaaggaagaggtttaactgtattttcagacagcatgattgtctatgtggagaatccagtttaatctattttaaagtgctactagaaaaaatttagtaagtttgcaggttataagatcaatatacaaaaatcaatttatgtatatacactagcaatcaacaattcgaagttgaaattaaaatagagaacatttacaataccactaaaaaaaaagaaatacttagggatacattctgacaaaaggtgggcaagatctgtacaccaaaactacaaaccattgtgaaaagaaatgaaggaagacctaaataaatgaagagatcgtccgttatcttgatttctgcttctgagatccacatggaaatacaaaggacctacagcaggcaaaacaactttgaaaaagaaaaacacagttgaaggactaatactacctgattacaagagtgactgtaaatccacagtactcaagatcggaaatagcttcaaatggacaaacagataatggaacaggaagaaagtcagggaatagacccatacatataaacacctgccctatgatgacatggagaaaatgaaaaggcaagacacagactgggaaaatattgacaaatcgtttttctgttaaaaacttgtggcaagagtatagaaagaactctcaaaaatcaatatgaaaacaaacacaagcagacaaagaaaattgggcaaaaggtttgagcagacacttcaccaaagaagtacaaatggcaaatcagcacatgaaacaatgctgaatatcattagtcaccagagaaatgcaaactgcacccacagtcttataccactgcacaccaagtagatgccagaaatgcaaactgcacccacagtcatataccactgcacaccaagtagatgcctaagaagctgctgttatcaagtgtcggcaaggccgtggaggaactggaaccctcgtatgctgctgagggcagtgcaaagtgtgcactaccactttgcaaacttatttcacagtttcttataaagattagcacacactcagcatacaatccagccattcctttcctaggtattccccaagagaaatggaagcatgtccacacaaaggcttgtacatgaatgttcctagcagctttatttataatggccaaaaactgggaatagcctaaatatacattaacaagcggatgaataagcaaactgcaatctttccatgcgatgaaatcgtactcaacaatgaaaaggcatgaactgatctcaaaatagttagattgagtgaaagaagccagtttaaagaagggtacctgctgtatggtgccattcatttaaaactctagaaaatgcaaactacagtcacagaaagaagatgagctgctgctgggggcaggtgagggtgggggcacaggggcagaagaaaatgtctgaggggccagaccccacctagactgtggcggtagcttcacaggtgtagacgtacgtccaaaatcttcaaattccgtacttcaaatttatatgtcgcttatacatcaatgaagcggctaaaaaacttctcattgtgggacagtctacaaagaactgtactgttcccttctagattttattttgtttttttattttttctgagatagagcctcactctgtcgcccaggctggagcgcagtggggcgatcttggttcactgcaacctccgcctcccgggttcaagcgattctcctgcctccgcctcccgagtagctaggactacagacgcctgccaccatgcctggctaatttttatgttttcagtggacgaggtttcccatgttggccaggctggtctcaatctcccgacctcaagtgatctgcgtgcctcagcctctaaagtgctgggattacaggcgtgagccactacacctggccccccttctagatttttaattcaagaaacacccccaaaaatgtggggggatttattctcaagactaatgtgtatcagctaagtgcagttcctagttggatcctggatcaaaaatcagaggctcacagaggacagttgtgaacaattgggaggaatttgactctggactgcgtgtcaggcagcaggattgggaggagtttgactccagactgcgtgtcaggagggaggactgtgtcgctgtcacgtgtctggagtgtgatcatggctttgtgctcatggaagcaaatgtccttttccttaggaatatttctgggcaaagcgtcatgctatctgcaactttcacacagtgcagaaaaacacaggggatcagggggcagaaagcaaacatggcagagtattttttgaaattgtccttagggtcatgtgatgggaccagagctcaagagcagcagaacttcatgatgagaaagtccaggagatgtggccacagctgtcttccgctggtcacactttgcaaggatggtggtagtggttgttttaataagttcctcaagcctgctgttagcatttgtgtatctgctaattagcaagattaaggagggggagagttaattaaggactcccgtaggcaaggttccagttaattgagggtttttcatagataaaattaatactcagtccagactgaccttctgagttatagttaataaagttgtggttatggtaccaccagggaactccaagagcgtaatgtcagtggatctggaaagatgctctgtgatggtattcatgaagtaaatccagatttggaaattcaaagaggcttcccactgggaacaggctgctgtggtccccggaaggaacccgcactatgaagaaaaggcagatgagagagtcatagaattttgtttctgcagcccccacgtctgtgctggttctcctacccgtgctcaaattctctactgttttctctgcaaagtcgtttcaccacagttcgtgtatgctggcgttgatagcctctcctcttcctgcttctccacttttccccactcccccttcctcacacacgtacacgcaaaactcaattcaaaaaatgtgcaaggttagctttctctgtcatccagcgatgactcagtctcaccaagggggcaagagagtgccatctagagcgtgtgaccctgctggtcccacagcagaaggcagtgccctggtgggggctagtctagttaggacctgagcaaacattttacttgtgtcccgaactcttgttcctatagtttctatcttaacaaattttatttttttagaacagttttagatttacagaaaactggaaaaggtagtaaatagagttctcatgtaccctacacccaattttccctgttgacatcttctattagtacaacatgtttgacacaacagtcaatgaacttatgttgatcagttattaactgcagttgatactctcatcagattttcttgctaatgtcctttttctgtcccaggatcccacatgacattgagtcctcgtgtcttcttgggcttctcttggccgtgacagtttcccagactctccttgtttttgatgaccttgacagctttcaggggtactggtcagggattttgtagactggccctctgttttgatttgcccaatttttttttcgtttgagacggagtctcactctgtcacccagtctggagtgcagtggcgcgatctcggctcactgcaacctctgcctcctgtgttcacgccattctcctgcctcagcctcccgagtagctgggattataggcgcccgccaccacgcccggctaatttttttgtattttgtttagtagagacgcagtttcaccatgttagtcaggatggtctcgatctcctgactgcgtgagccaccgctcccggccatgcccaatgtttttgtcctgattagattgggatttggagaggaagaccacagaggggagtgcccttctggtcccgtcataatgagggtgcatgctgttggaatggcagatccctggtggcgctggcctgggtccctggctgaggtggagcagacccggctgaggtcaggcgtcccccgggtgaagccgctgctgccgccccttccggaatgggctgctctttggaaggaagtcgcttggatgtgctaggcttttgttgcctaaactgctttatgtctgtggttaacttattccttcctgcagtttcattatctttttagggtctaaatatagttcttttaatttcctcttgttatttatataggcttactgtataaggcttagtcttggagttgttttattttattacattttgttttgcatttctgggattttttagtattccttctttcagtttgccccttcttgagctaaccttcctgcagtaccatcttccagctgactgtcagtggatgaggtggaaacagttttaccctttctgcagggagctttgccagttagggacccttcaggagtagtcaggaacgcgcctgtgcccacagttgggtgagtcccaggaacggcaaaaatgtcacctagcgttccccctgctcatctaacatagtttaattgccttgatggtccatggaatttccaaactagaggttgtgatatgcagaaaatcaacaagattgcattgctagggagcacgtttgtgaagctggcgtcttccacagaagctgtcatcagcgaggaggggctgttgaggggacacatttgtgaagccagcatctttcacagaagctgtcatcagcgaggaggtgccgttgaggggactccgggtgatgctttcgtcgtttggaaagtagcactgctgtgcagaatggcctctttttagccatcctcctagttccatgtggagccctcagaatgggttttactccgggcagattccaacacaccctcatgctatcccgggagaactgcggaccaggaaggcagaggccccttcctcccacccccatggaagccagaccacacgagctgggccacccagctgtcccagcactgggtcggtcctgggagaccacccaccccagaagagaccaggctaggtgacatgcacattggtgacaggccaggctgcagggaactgggtctgtcggtgccccctgggaaggtgggaggtgtttggctggagggagacagttgtatcagctgcctccgggttgccaagaatgaaatgaacaaaagagagaggaacccggagggggctgtctgcccagccatcccagttccaggctcttttcgcctgcacccaggcagactagaccgagccctggcaggggtgacggctcgccctttgcaagatggatgggcacaacggggccctggcaggtggaggtagcacggcaggctgtgccgagggcgaccacagaggctgtctctgtgtggcaacttcagggccccatgattgatggttaggctgcttggaacctgatcaaatctcagctcagcctgctgggtgtgagcaagggagaggggatggggagcctggtcagcctagagcgggccccccaccactgaggaggccccgggggggacccccagcctgacttctccctgctcatggctggctcctgtcccacactctttcgctactgtatttcctcttcttagtattagaatttggatgagaaaggcaccacagttttgacctgaggtcaaggctgggttcgttgcaggtccagaaggctgcagctcagacacctactctagccagaaatgcccggggctctgtgcggttccaagggctcctttgccagccctgccactgggcacagggagcccctccactactcaccgcagacagagcagctctccagtgggaagcaggtcctgggagtgattggcatacgtgatctggaattgtgatgtttctccacagcccaaacatgggttcttttattcattcatccaacatttactgagcgcctaataggaaccaggacgtgctgcctcctgggactaataaagactaataatgcatgtttttgtcctcacagagctgaaatctagcccggaaggtggagggtggaaatggctaactcaaatgcagcagcttgggaagtgcagtccaagtccctgcaaagggtggggagagaagcctttgcagaggctgttgcccggggacagggccccaggcggagaggacaaaggcccagcaggcagagggagctcaccacattcccaaagccgcaaaacaatgagctcggtgtgccccaaagtctgaggagctgaggagaaaggggaagatgagtttctttgtgcagagatgtttctcagtcaccactgtcacactgctgggttattgacaccagaatgtgaagaatctcactgtcagtgccacatgtgggagggcattgcttaccatgactcagcgtggcctcagggacagtgcgtcaggcccggcaggacagcactcggtctgtgctggggaagtcgtgcagacgtgcagagatacagacatgtggacccaagtcagccccggactgagcagcgggtaccccagaagggatgggcagtggaataaggattacatgtaggggcagaggacgtctcagtctgtacctgtctatagcattttaatgtttgagccttgatacctacaaattttaggacaggtttgaaaaagattgaaaaagatggaaagcatgccagtgattttgctatggacatcagatgcagcattcagggccactgtagacgtgggtatgtctggcctgagaataactaaagggctttttttttttttagacagtcttgctctgtcaccaggctggagtgcagtgacatgatctcagctcactgcaacctccacctcccgggttcaagcgattttcctgcctcagcctcccaagtaactgggaccacaggcgcgtgccaccacgcccagctaatttttgtgtttctagtagagatggggtttcaccgtgttagccaggatggtctccgtctcttaacctcatgatccacccgcctcggcctcccaaagtgctgggattagaattaaccatttacagaaaatcaatgtgtctatattaatatatatatttatgttgaaatatcttgcctcacttggcgagtggggaatacactgtgcctgggggtgaaggtctgaggcggaaagcttgtcttgcactgctcggtggatgttctgctgaagtcgtgaagagcagtgagctcttgtgaccggtaaacagaaatccctgcttcggtatcatttccccaggcattagcagttttattggcacccaccattgtgaaaacgctgcacatatcaacatctcagcacagccctccatctgcctgcagatgacttccccggtagcatcctcacgttacggtaacacaccaccgaaggctcactcaggagctgtgttcttgttggaaacttttttccttcccagcaccccgctcataacaagggctaaactcttctacccagtggacatgaaacacggcccgtatctctgtgattgtctctgtgttcacgtcagaacgcacgtggtagggtatttgcgtgaaatcgcgcgtggtagggtgttcgcgtgaaatggctcagggcttggctcatcatcctgcctccttatgccttccccgtcaggcacggtggtctgttagcctgggcgtaattcttgtgttcctgcttctccataaaataatccttaaaatctttgttaaggagaataaagggagggtctcttcccatggcatcttttgccagaatattcagaggaagaaagcccgccccggccttacgggtgcaccttgtagaaggcagggccttggccaggggctcctcctggtctctgccccattgtcgtgtctgcttgcaaaccacatctttagttgctgcaacaacaaatacatgcttgcatcttcccactttgtgtttgctcttcttctcttcttcacctcccttttccccatttaaaaaaatataagttcctgaaacctgagacacagaagaatcaaaattggcttcagtgtgtggtgagggaagggggcttgctcaggaaaaaaaatgtcatgttcatgctcttcccacctgctttctactctggccttcacatgtcaccaccatagcttgatctgggagaaaacaagcacagcaagatggagcctgttgagagggcggctttggcagattcacgctgccggcaccgtgctgttcatctgagccccgagtctctgccgggtcttccaccaagcccctccgcccaggatgtgtgtgtcgcctgccgggtcttccaccgagcccgtgccacgcagggtgtgtgtgtcgcctgccgggtcttcacaccgagcctgtgccacgcagggtgtgtgtgtcgcctgccgggtcttcccaccgagcccgtgccgcccaggatgtgtgtgtcacctgctgggtcttcacaccgagcccgtgccacgcagggtgtgtgtgtcacctgccaggtcttccaccgagcccgtgccgcccaggatgtgtgtgtcacctgctgggtcttcacaccgagcccatgccacgcagggtgtgtgtgtcacctgccaggtcttccaccgagcccgtgccgcccaggatgtgtgtgtcacctgctgggtcttcacaccgagcccgtgccacgcagggtgtgtgtgtcacctgccgggtcttccaccgagcccgtgctgcccaggatgtgtgtgtcacctgccgggtcttccaccgagcccgtgccacgcagggtgtgtgtgtcgcctgccgtgtcttcccaccgaacccgtgccacgcagggtgtgtgtgtcgcctgccgggtcttccaccgagcccgtgccacgcagggtgtgtgtgtcgcctgccgggtcttcacaccgagcccgtgccacgcagggtgtgtgtgtcgcctgccgggtcttccaccgagcccgtgccacgcagggtgtgtgtgtcgcctgccgtgtcttcccaccgagcccgtgccacgcagggtgtgtgtgtcgcctgccgtgtcttcccaccgagcccgtgccacgcagggtgtgtgtgtcgcctgccgtgtcttcccaccgagcccgtgccacgcagggtgtgtgtgtcgcctgccgtgtcttcccaccgagcctgtgccacgcagggtgtgtgtgtcgcctgccgggtcttccaccaagcccctccgcccaggatgtgtgtgtcgcctgctgggtcttcacaccgagcccgtgccacgcagggtgtgtgtgtcgcctgccgggtcttccaccaagcccctccacccaggatgtgtgtgtcgcctgccgggtcttccaccgagcccgtgccacgcagggtgtgtgtgtcgcctgccgggtcttccaccgagcccgtgccacacagggtgtgtgtgtcgcctgccgggtcttccaccgagcccgtgccacacagggtgtgtgtgtcgcctgctgggttttccaccgagcctgtgccatgcagggtgtgtgtgtcgcctgccgggtcttcccaccgagcccgtgccactcagggtgtgtgtgtcgcctgccgggtcttccaccgagcccgtgccatgcagggtgtgtgtgtcgcctgctgggtcttcccaccgagcccgtgccgcccaggatgtgtgtgtgtcgcctgctgggtcttcccactgagcccgtgccacgcagggagtgtgtgttgcctgctggctgccgttctgcgcgtgtgtggtttcaagtcttgtttcctcttctgtttaacgaggcccttggtctaagtgtgcttgtaatttgggcgagtgagcagcagccgagagagtccaccccagtccccctagccagcgaagtgggagctcccaggttcctgcctgcggggagggtgggggcggtttgagttagtgaaaatgtgtgtattaaacagatatgtaaatgacccctgccgagcgctgaaaatgaaggtatgaaaaggcatcatcatccgtggttcccacctggcataatgaccgtatcagaacagacatctggtagtatacaccacatagttgccagactccgataccaagggcacatctaagttctcccaccctgatttgcatgcctcaaattcagaattagtgagatttgagtcagtgatgcttcattacactctcgtgagacatgtttgaggagcttcaccgtgaatgtgtgggcttcgatttgacttgtggaacctgtggttaaaacaaaggaaggtgccttcattctcagaacccagtgctttttctgttgccctggccctctgggctgagtctttacgtggacggcggtcgatgcatctcagtttatttgtcaaaaccttcagctaaagccagttgttgcttgaaaactgcctgcttaattggcctcctcagctcgggggagcagcttgcaatctgaggccggcgcctggctccctgaccacccgctccccatcgtgctcagctctcattccagcagcccagcccataacccgcctcatcagtgtattgatgtgaggcagaaacacctcattgtaagagcacccctgagaaatggcggggttaggggcttctgggctgcataaccagcagattccctctgcaaaactgctcctgcctcagtgggaaagggccagctgtgcagggctgcactggagagccgttctcttcttgatcctcaggcatccagttcttaaaattccggccctctgtccttgcatggccttcgtcctctggaaaggagcatgctgggagctggcagaacgcacgcctcactctgtcgatgcagtgtctgtcactgctcagtttctaggtattgatcctagaaacccatgctctgtgggtccctctccaagaaacacagcatccatgatttgtacatcgcactgcagtttcagactgctttcacatgcgtggtttcatctctgactccacgacctgagcacagattttttttttttgagacgtagtcttgctctgtcgcccaggctggaatgcagtggtgcgatctcagctcactacagcctccgcctcccaggttccagcgattctcctgcctcagcctcccgagtagctgggactacaggcacgcaccaccacaccctgctaatttttgtattttttagtagagacaggatttcaccatattggccaggctggtctcgaactcctgaccttgtgacccgcctgtctcagcctcccaaagtgctgggattataggcatgagccaccacgcccagctgagcacagatttttaaaactttacctgggtccctgactagtaagagggagaacctggacttgaaacttagttttgtttcaaatcttgccccttttcctcgggttttgggcaaatacttcccgaagtattatcgttacccctgaatatccaaggcaggatcattttattcccttccagagccagcacttgcagaagtgtccccaagttaggcagcctggtgtggcttccggtaacactgccagcctcagagccggcctgtttcctccaggacgcccacaggaccctcggaagccccttcctctaggggcccgtccctcctccttccccaggccccgtcccccgccttgccctctgaaagtggtcttcagcaccacccgataagcggtgacttctcatcttagaagcctggcttgggtcaggttctgcgtttcggctgtgcgcgccccggagcagccctgcttgtgtctcatcatcgatgcctcagctgcagtgtgccccactgtaacccctccgggatgaaaacgcaacccacctcttcagtgggcagccctccacttggatcctcgcatccctggcatcatctccgtcctctgtccttgctgacccagctccaacccagcctgtctgacccgtagcccacctgccatgtccttcccggctgcagctcctgctgggctctgcagcccctcctgcccaacgccacctgcccccgcctgccctgctcctgcttgcccttcccctgcccctgcccccgcctgccctgcccccacctgccctgcccctttctcctcccactcccacatcccgggcctggacctgccatttcctagcagcaggagtcttttccctcgatcccacccttccccttcttccctcactgccctggacagttctgtctgctcatcagcgtaaagaggtctccaaaaagtacaagaccctccctctccccgctttccaagcaccctatggtgcctctcgctgctccttcaggaactgtgagcagggcacaaatacctagtgctcagcacccagtaggccctcacgactgtgccgagccatggccgtgtggctgtgattgtgctgacagcacacagtaggtcctcacgactgaggcgagtcatggccacgtgactgtgaatgtgtagacaggcacagaatggcctgaagcgtgggaaggtcgcctgcctggcagcagctttagcaccaggaaacctcccaccttggggctgcccctgagggtgaacaagtggggccagtgggaagcacctgctcaagtgggactgtgcacacaaatcactgggaattactgcctcacacacgattggttttcagcattttgtaagtccaagcaaacccccaagaaaagcttgagcgggaccgggtctgcaccaacaggctggttctgagtgagtgctggatggatgtgctccagtgtggagggcagagggagggagcgggacccctggagaggagcggggtgcaggcaggggctgcagggcactccccagcaggtgcccggacgttgtgaaagaaaacgtctgggagctgctttcctctgggcgttcgtgggatccctccccttcttagccaaggaaagcatgtctgcaggcaccggctgcagctgtttttcaaatgaaaactgggcttgaaaggaggaaataattgaggtataagaagtccctgcccttattcgttcacgcaccatgagaagcttgtggcatctgcgggacactgcactcactgcctctcctctgtctctttctgtccagtcgtgccaagcggacctcgtgaaggacaacggccacaagtacttcctgtcggtcctggcggacccctacatgccagtaaggacggggcagcacgctctccacgggcttgggactcagcactcgcctctgcccacacgctgcactgcggtggggccttttgacgggggctacaggagaaaggtcaagggtcacagcaggggccacgtccacggggtcagcaactgcttcacgttagacatggccctttgcttactaccatgagcgcagctgttatttcgtgtctgtctctaaacaagagctcagttaacccggacacatgggtggttttagtttattttagtctcttttcactgggacttctttgcaaaatagtcaaatccactctccctgctgtccgccgcgttagactagtgagcgccgcacgtctgtaatatgagagttcaggcgcctgggaaggtcttggagcacaagaagatatcgaagcaccccatttcaggaaggaagggagagaggaaaggaaggaaagaaggttgtttgaaagtttaaattttcagtatactttattgtattaaattgtttgaaaattagtaatccatgaatagggtgtatagttattctataaatgtttcataatgttttaatttctaactcccagcttagtaatgagaacaaaatagatatatcctaaataattctttaacataacttaatattgccagaatatttaaacatattagctagtttacacagtgttcggtggctttgctgtataaaggaacttttgtatgtaatttcaccccctagttggttttctaagctaaaggattttttaaaacacaaaacaaacaggactattttccaaaaggtaaacagtatgtgcactttgtgttgtattgaaacatcacaggcagttaaagttgatactttgtatcagttttggaaaccatcacttcccattcttaagaataaggaagaaagcaaatcccacatgaagaagtgaggaagaatgctcactggcgacttgggcgcgagggtgagctaagctcacatgaacggccccacctcagccacgagcctgcggaagttttgaggacacagccaggtttgaaagaatgaaaaggaggctgggtatggtggctcacacctgtaatcccagcgctttgggaggccaaggctgacagactgcttgagctcgggagttcgagaccagcctgggcgacatggtgaaaccccgtttctaccaaaaatacaaaaaaatttgtctggcgttgtggcacacgcctgtggtctcagctactcaggaggctgcagtgggaggatcgcctgagcccggggaagtcaaggctgcaatgagctgtgactgtacaactgcactccagcctgagcaacagagtgagaccccgtctccactcaataaataaataatataaatattcttaaatgactgactagaaagaatttgctatgattctgtcaaaccatcaaccattgttttgtttcttcagtgctttgtgcctgttatgagaaaacattcagtgcttcctactcatcctcagaaacgattgatttttctaaactcataagcagatctgaaaaaacaaattgaagctgtgaaaaagaaaagacatgcactgttattgaaaactctggagatgaattaaatcacagaacagacagccaagaagagaattcatgaaggagccacctggagcgccgtccatgaagctaagcgagaagatatgaaagccgggctaagagccgggctgggaacgttcaccatgtagccagcatggttcagaatgagaggagaataagtagagaagcagtttttgattagatagtggctgagaattttccagatttgaagaaaggagagttccgattttaaaagcaggatgaatcctgagaaggttaaagagaaacaaattcgtacatagacgcatcataatgaaaacagcaaatatcgaaggcataaagacaaaccttaaaagtccccagaacaaacgttattagcaaaggaggagacagcaccggccccaacagcagacctctcatcagcagcggctctcggccggggacaggggagccctcggcgtgcgaggaaagcgaccacggtcgggtcacctgcacccagctcagtcaccactcaggaatgggggtgtagtaagcagcgttcagacaccaacagtttactccttccgaaccccacagaccatggctagaaagaccacatgtcagcgaggaggaaacggaaccaggaggggaaagcaagatgcaggacacggcaaaaagccaagaagttggcacacgtgttggcacatctatagatttgtaaaaatgaagaatactcatggcgaattggagggttaaacaagaggaggactcaggtaccctgggagccctgcaataatccaaggagccctgcaataatccaagaggcgcgtaggacactagaccgcgcgacgtgtgtgtaaaaaactaaggcaccgctaaaaagttacaaatagactctggtttccaggtcagcggaggcacagaggaaaggacagaatgaaaatgagtcacagtagagcagaaaggagaaaccagtgaaacctagagcgctgcctccatgccttttgctgccaaagcccctgattgcaggaccgtgtgctcacagagtgctgggcaggctggggaggtgaggtccgggtgcttcataccgacagccacggctggcctgtgacagaggaggcatccaccaggtctgtgcccgtcttgcagtgttagggcttccaaggagcagtctgttcactccgggaggcgagcctggagctctaaggcctttgaaaacagctgttcttttttgtagagtccacgtaaaatccaggagtaaagctggctctcgttactttaattatgcgccacgcgtgtcatgaagattccgaaaggatcacgctgttgtactttgggaatgagagtttccactgaggggagacgaccaggactggtttttgttttccaggctgaacaccggaccatgacggctttcattctcgccgtgatcgtcaacagctatcacacggggcaggtgagccccccagccacccccagccccagagctcacccttggcattgcagaggagctgggcccactgtgaaacgtggtgccacatgggggacagggggtgtccagcagaggctctgacccttcatctagccagccatttgcaggctgaatatgaatcagaggaatctaaaatggggaaaattgagcaaatcaaggcttcccaagaatgggtggccaccgttgtcccgtgcaggtacccaccacgtgcctgccattggcaggcagaggccaacctgtctgtggtcccgcctctgcaggaagcctgccttcagggaaacctcattgccatctgcctggagcagctcaacgacccgcaccccttgctgcgccagtgggtggccatctgcctcggcaggatctggcagaacttcgactcggcgaggtggtgcggcgtgagggacagcgctcatgagaagctctacagcctcctctccgaccccattcccgaggtgagtcaggcgggggctcagagtccagtcctcctggctgccgactgcgggggtaaggcagaggtctgctcgcgtgcgggtgtggccggccacgtgtccaggaacttcaggggctgcacgctaataagagtaggacagtgggaccttggtgagaagagaaccacaccactggggattttgcacccaggcccagagtgcgctcccggggacagtggcacagctgcaagcgggggtcccagagggaacctcagaggcaggggtcacgtgctcgctgtccgggtgccgctctgcgtcctcactgtggcctgcaaggcagggaccactagatctccactttacgggcaaggagtcaggccagtggctcgtgcctggtgcagctgggaaaggtgcggggcactgcccacagagtggccgcgggctggaactctgggagtttcatgcaccattgccttcactcttcccaccggcctgtgcagtgcacagggtgttgctcatttttagagctgaggaagcagactcagggacagtgacttctccccaggaccacatggtgtcagaggcaagggctaagccagggtccccggaccccagggccagcacagtgtcgctcccctggctgagccctgtgtgctcagtgcacttcagggcccccatgcccctctgcgtccaggagtgcctgcgccctcccctctttccaccctcccacgctctgtggcccatcccagccccctcgtctaactcctgcctcgttcatcagcacattccctggtgcctggtttggtgtttcagttcccggggcaatgcagctcccgcctctgcagtctgagctgcccctggagctgggcggctgcccctgctgctccccacctccttccccgttgccactctgatagtgcgaggagagccttgggcctggagagctgttgagcaagcgcctgtggggttggattcacctgcacacacagccctggcagaaaggcaggctgcagcatggcccggtgtgggacatgcctgtgaccccccgccgccttgcaggtccgctgcgcagcggtcttcgcccttggcacgttcgtgggcaactctgcagagaggacggaccactccaccaccatcgaccacaacgtggccatgatgctggcccagctggtcagcgacgggagccccatggtccggaaggtgcgtgaacccccagcccggcagcagcagggcacccaggctggaccccgtgacacctggggccaagcccgcatggccctgaccacagcagggagcactcagtttccactgcgtgtcattgcgagagcagatctttacatgtttcattctcttcaagttgcgtttctttaccagacacccatgggtttgcttcatttaaaggcatctagcaggctgcgcctcccggcagcttgtgtagtagtctccttcctgcctgggagcaacacacacaggcaccactgcgattccaaagagacgcagccacccacagatggcgggaaggtttgtgtgctgggtcccccccaacaccccatgtacgtcagcgactgaacaaaacagttttatgttttgttttgttttgtttttgtttttttgagatggagtctctctctgttgcccaggctggagtgcagtggcgtgatcttggctcactgcaagctccgcctcccgggttcatgccatctcctcctcagcctcccgagtaactgggactacaggtgcccgccaccacactcggctaattttttgtatttttagtagagatggggtttcactgtgttagccaggatggtctcgatctcctgacatcgtgatccacccacctcagtctcccaaagtgctgagattacaggcgtgagccaccgcgcccggccaaaacagttttataaacttgaaaacttacttacctgtttagatgtagaaatatcacagatgatcgtccaaggtttcacaccctcagattccccacccaccccagcgcaaaaggggcgtttaggaagacactggtttcctgatctcctttgctggtgagatggaaggctgctcttgcagagaactcatctgacagctggagcacagagctgctctatgggcagggagtgtgtctccccgtcaggtggcgttggccaccctcgtgcgttcccgtgctggctgtgtgtggctccctcttggagatgggctttatcatgagacgggccgtggtccaggggcctgggggttgtttgtctggagagcagctgccgctgctttacttgggagggacgtgacccggacaggtttccctcagccagacgaagtgtggaaagtcacgttctatcgtgtgtacccttctagaattagcccaagtcatgagtatgctacattttctaacgaaatcttgaaaataggaagtgaggttccgggctgccttttctgttggttctgactttgttgccatcacgttctcctcgtggccgggtttctgaacctggcttcttttggcccctgctgaattctttttcccacatcaactcacgtttggtggacatcactgatcaaagcagcaaatcagcggtttgtctgctaaaattctttttaaagtaaggaaagctttgtttcttctttacaaaaacgatatgaaaatagagaggacgttagctgtgaggcgttccccaagagccatcccgtggccgggctgtggccctgtggtgtggccctggctgctgaggcactgagacgaagctccccctccaccgggagcggtccggcgtcactcgcctgcacggctgcctgctgaacctgcatcctggagatgtggcccgcgaggacaccgtggggttcggaggaggtgctgccaaccgggacgcagctgtctcggggatgctgggcagggcgtgtagagggggatgacagcccctgccctccgggagcacgtggtctaatcaaagaggcagatacagataaggtcattacaccagagccttgtggagaaatactgcctggagtgctgtggagctcctgagggctgtgcctgtgcctgcatcggagcgggaagggtgtcagcagaggcttttgtggaggggcagctcttacctggttatggagggtgagcaggagaagcagccaacagagctgataacgccagctggcagggtgatgtctggagggaggaaggctagcgaggagtcagagaaagacaccgtcactcacctgtgaccaagcgggctgcactggcgcgcagactccggaggtgcgctggctctgaggggctgtgctgactctggggggtgccagctcggggggtgcgctggctctgagggggtgtgctgactctgaggggtgccacctcggggggtgcgctggctctgagggggtgtgctgactctggggggtgccagctcggggggtgtaccgactccgggggtgtgctgactcttggggggggtgctgactccaggggtgcgcctccatcctcgtcatagagtcctgccgcatcacagctggttttctcttctgtttactaaccaccatgggcaggcacggtgctctgcaggggacttgggcacaggtgcaagcaccaaggagcctggcggcgtggagccggccccattctcgcagcctcttctcaaggaccatcctgagcccgtcctgagcctgctgtggggctggggttggggagtagaactggctgagaggctcctggcaccctctggggtgggagagaggagggtgttactgctgcttttccataaaagcaacgtgtactggttaccaaaaaggttacatccatcctactttttaataataaaagtgtcctctcctgtgtggggtgataacgatggccgagtaggttttgtttgttgacttgtttaatgagcttacttgacaaaatttaaaagtcagcaaattcagcttagcccccaaattattttgaacttcaacctgtctttgaagtacaaaacctgcagtcagcagccacccgtcccttgtcaagaagggccaggccaggggtgcggggctagaacccccagtgtcaccccagcctctgcctgggccgggctgggcaggagccgcacacagggacgggctcagcggggcttggatgggggcttactccctccctgtcatggcctcgggaggaaataaggactgttcagatactattttattttatttgttttattttattttgaaacagagtctctgtcacccagattggaatacagtggcacaatctcggctcactgcaacctctgcctcccgggctcaagcgatcctcccacctcagcctcctgagtagctgggaccacaggcgcgtgccaccatgctgggctaatttttgtattttttgtagagatggggtctcgctgtgttgccccaggctggcctcaaattcctgggctcaagtgatccactctgtaatcccaggccttggtctcccaagatgcttcccaggacgctgctcgggcctgctgtggtcacaggagctgagttttatgatgcctgagcacaggtcacaagacaaatattagccagtgctgtgttgttggagcggagtgggtggccctcagggcaggtgggcaaggggtagaggcgaggtgggccagtagcccatggtcagtgcagccgtgtcaacactgggaagtgtgtgggcccccagcggggcaggacatgtgtccaagaaagatgtccttgagtcctggcaccagttcacggttagaaactaaccatgtgctacagacgacacccctgcagggagggctgcacccacccagaacacacttgtcaggcacgtgccacgtgccgggccggctggggcctcagtgaccccgcagggcactaaccctgcctcttctctcaagaaagttacccctggagctgggggaggggctgggtgtgagagtggtgggccggggtggcagctgagcagagccagtatggatggggctgggggcacagggaggccttgccacagggagaggcccagtgcaggggctgtgcccatcagagggcgtgggcacaagaggccaggagggcagtggggcaggtggcccagccaggcacaagccttgtcgttcgtgatcagaggcctggaggggtttgggggcaggacctcaccttcggctgcccaggtgagaggggccgctcgcccagctgcagggacggcgcaggagggaagaggcaccagcactttgaatgcggagctcacagcacttgctcacaggtggagagggtacgagaaaagaagaggacagggaatcctgggggtttgggtctgagcaacagaagagcagagttgcccctcgttgaaggggccagccatgaaggagcaggttccaggatcacgcatggactctgaaggtggggagccgacaggaagggctgagctgacaggtgaaagtatgagtccaggcaaagctgcctccctttcgaggaaggctgctcagccccagccagggagcaggaggacagacaatggctttgacaagcgaccggtcagaggacctgggaagcctggccagtgtggagcccgtggccactaatgtggcctccccgtctgtgtgctgctggggagccctcagggggaaggggtcacatgacaacaccagccaagctcatcttgcaaaagctgagagagaggggagctcccacacccctggctgagcacctctgccagaccctctgatgggttctgcatgaatatcctaaagaaggccagtgcgtgtgtgtgttgctgtcagagcccagctccattcaggaagggcaggaagggtccaacgcaaaggagagctctttgctgtgtgccaggcagcagcctccagagcgaggcccgccatctccagcaggatgtgcggcctccaagggaggcccccgtacgcagcaggatgtgcggcctccgagggaggcccccgtatgcagcaggatgtgcggcctccgagggaggcccccgtacgcagcaggatgtgcggcctccgagggaggcccccgtacgcagcaggatgtgcggcctccgagggaggcccccgtacacagcaggatgtgcggcctccgagggaggcccccgtacgcagcaggatgtgtgttcgggagtgagggaggcccctgtatgcagcaggatgtgtgttcaggagtgagggatgtgcggcccccgagggaggccccgtgcgcagcaggatgtgtgttcgggagtgagtgctctctggacattccccttgaataacagacgtggcccctgttggcctcccctgaatcgaagggcccaccacctcggtgcacgttaatccatgccagctcccagctctggcttttctcacctgatgtcagaaggaaagggaaaaaaatcggtgctttctgaagacaggtgcagccttgatcttccctggaaggggcccagtgggtgttcgctttgtcggaggccccgtctcggcagtgcctcactcctcttgcacagggaaggcagcgggggttctgtggtttgccaggggagcctgggacagtgacttaggcagttggagacgagcgccagaaccggggcgtgggccatggccgtgaagacgcacactgggccatggcccttggtgcccagcagggtgggaggggcgggtggagggtgatgccagggctccattctgagcagtgagagacttgcagttccatcggcgcaaatcaagagggcgctgcaggctgaagggaaagtagacggtgcccgcagttcatagggcagggagagtttggggtgcaggtgaagagccggcagctggacagccagcctggacctaggagagtgaggggccggcatcagggaaaccacaaagcatgataggaggaagcccggggcatgtaaggctggggtgggaaagtgcgtgtacagagagtgcgtagacggagagtggggtggccacgagaagaccctggtccctggtgggcgcccatccagagcctgctcatccagccgctgtggagacaggggcgtcacgcgactagcaaggggtcctctcacagcgcttggctttctgctaagaatccgtattttttcttttcagaaaaaaaaaaggcagaaaaagttgtcgtagggaaaaaaacgttctttccgctttttaaacctacatcccccttctgttccccagtgacttctaggatctccagctgttcctgtcacagcactgaactgtcctaaaagagaggcaaattgtgtctgttcccttggaccaaggcatttggtcctaaagatgatgttttagttctacaacttttcccgttccctcttagggactagaaacatctaccaatgaaagtttcacatgtgttgaaaagagcaggcttcggcttgtccgctgcactcggccctggggcgctcagattcagaaaggccgccagccatcgggtgtgatctagagcggcgttttcagccagggtcccagtggtcaccgtaagcgagaggctgtgaggcctcctacctttccctctctggagtcctgtgactcaccgtgtccttacgagacccccgatgcgtcgtgcgcctctagcagtggggaggattctggcaggcattctgggcttcccccgtgagccagtggcctgccgtctcccagcactctgctattccaaggcctctgctctgacggttcgaaaagggatggtccctgtttctgatgccaattgcacggttttgtcttaacctttcttttttctgttggtgactcaagtctcactgctgctccacaatcattttccagccccagtgactgttattgtcccttctccctctcggcaggagctggtggtggctctgagtcatcttgtggttcagtatgaaagcaatttctgcaccgtggccctgcagttcatagaagaggaaaagaactacgccttgccttctccagcaaccacaggtatggcgtcttctcctgtgaacccgcagagcacctcgcctggcggttctagtgcaggccgcggcccagtcttgctcaccctcgcagagtctaagcgcaggtttctcagatacctgccgcaaggggtccctgtttttctcatctttttaggcacctgccagatttaaaagggcaggaaagagggccacactgaccctcttacatttttcctttctttttaccctttttggaaattaaactcacagagaccttgaagtatgacaaaacttctgcagtaggagcttgcggaaaagcgcaggggccgtcttcctgcgatgagtaatttcatcacactgctcttggctccgtggctcggtgagtcatgtcaggcgtgctttctcacacgtgtcgttttgactggagagtacagttcctatctcatcgctgccggcagcccctcccgcttccacacagccgtctctgccgtgcaggggcttgtcatcagcagtgaggcctcactgcttctaggaagcccaggaggggagaagggtgagccagactgagtgtggacggtcattgctctgctgcggcttcccggggagcacggctcacggcccacgtcaccatgcacctcgtgtgcactcggacaggccgcagccaccagcctctcccctgttgtcttttgtaatttaatatgcacagagccacaagcggttgttgtttgtccagtgctatcccgcagagcctccgctcacgtctgagtctccctgagctgtgcagcccctgctctgacatttgttgcagcacaggtagcagctgccgtcaccgagtgtcccagctgctgagtgtcagaagacacgctggcctccacctggaagcccattgtaatttgtctttctccttctttcccagagggagggagtttgaccccagtgcgagacagcccgtgcacccccagacttcgttctgtgagctcctatggaaacatccgtgctgtcgccacagccaggagcctcaacaaatctttgcagaacctgagtttgacagaggaatgtaagatcctggaaatcgggttattggattgggagagattggggttgttttttctgaaacactgtatctgagtaagcaccactctgcccctgccccttcgtctaagtgcgtgccctgaagtcccatctgccaacatggtgatgagtcacccttccagacgtgagcatggcaaggaggcgtaggccagcccccagaatagccagcgggcccgttaccaatgcggcagggagctcaagcgcagccgcagttgaggcggtggctccttggagggctgtgccctgcccccgtctcccagtaacctgtggtctgcgggtggggagcttggctcccagggagatcagtgagtgcctgtgcctgtgtgtgcgccggggcgtgtgtgccagggtgtgtgcgccagggtgcgtgtgtaccagggtgtgtgtgcgccgggtgtgtgtgtgcgccaggtgtgtgcgcgcgccaggtgtgtgtgcgccagggtgtgtgtgtgctgggtgtgtgtgcacaagggtgtgtgcatgccagggtgtgtgtgtgtgtgtacaagggtgtgtgtgtgccagggtgtgtgtactgggtgtgtatacgcgccaggttgtgtctgtacgcgccagggtgtgtgcgccagggtgtgtgtgtatgagggtgtgtgtatgtcgggtgtgtgtacatgccagggtgtgtgcgcaccagggtgtgtgtgtaccagggtgtgtttgtgcctgggtgtgctgagctttatttagaagaaaatatgtatctcagtcatgccattaactgtaagaccaaaaggagggtcccgggagcaccccactgaccccgttgcgtctcgggcagctggtggcgcggtggcgttctcccccggaaacctcagcaccagcagcagcgccagcagcaccctgggcagccccgagaatgaggagcatatcctgtccttcgagaccatcgacaagatgcgccgcgccagctcctactcctccctcaactccctcatcggtgagtccgcctgcccctttctgcttccgaggggccccgagggtctcctccccacacagagcagcacagacctgtgtctgcatcaggtcagtgggtgtcaaaactgtctgttcaaaagaaagaataaaggtcaacaggactgcgaggcagggagaacgttttgctggggcaagcgggaaagttgacatcactgttgtgttggggtagtattttacaggctgctccggagccatcggagctggccagtttggctgggtgggaaggctgccagaaccttccatctttgttccatagacgggtgagagttcttcatggtgctggacaccctggtgatgcagaacggtggttctcagccgggggtggttttgccccccacgagcaactggggtacagtaggggtgctccttgtcccagtgggtgaggccaggaagctgctcacatcccctggtgcccaggacagcccccacacagtgtccgcagtgagaggcggagggccctgcggtcgggctgggggctgtcatccccgccctgctcacctgcggaatctccacacaactttccctccatcccagcagcttgacgcagcactgcctggaaatggaaatctgacggaagggtcagattcttctcttgttctgccatgaatggtgtgtgcctgggtcctaccaccaggattgctgttgtaaaacaggagaagcaggaattcaccgtgttttcttattgtgtagctatgttcatcttcacactgctggtaacagatttagggcttaaccaaatgagcctcatctcctcttgttctgactatccagagtggcttaccggcttcatttgaatttttttcatgttaaggagcattttagccatgtaaaaatttacagagacttatataagagcgctgcgtgtgtgtgtgtgtgtgttgtgttcccagcttaaggaattacagaggtcgagccccagaccctaccccggtcccattccctctggtgacattacactttccctccctggccatgagccctggcacacacgtggtgcccacttagaggcctttacctcctattggcgccgtcgcacgatgcgtggcccgcaaagcccgtttctttggctctgacttcaatatgtatctttgatggtcatctaggttttgttccttcacctccgcgatctgccgtgactccattatccattctcctgtctggggacagtgaggccggttctagtttcttcttgccttttgttccttttcttaataagcaaactcagaattcagcccctgccaccatggagccccacatccaacacaccctcactcgctgcacccagctctgctgggccccagcctacccggcccccagcctgggcatcggtggggaagctcttctccggcatatggtggccgctcccctctcattcagagcccccatctggcagcaccttcccagaagcctccccagccccacgccccacctggaatcaggcttccccagctgccctctgaccctgctcccttttcctgctttatttttctcctgaggactgtggactgcagacgtgctgtacgtgtaacttgttcattggcccggcccatctctctcccctggagcttgagagccgcacgtgcaggaacccagccttgttaaccactgtctcctcccaccctgtccacacccagtgcctggtacgcagtaggtgctcaatacacataaacgggcacgtgtgtggtgcgtgttcttcagcgtggatacacgtgagtgcctctcgccaccttgcctcagagtgaagctgctgcgtgaacggtgcctgcaccttcagcttttgtagatgtcgccccaggccttccacgggatcctctgttctaaagcgcaggcgcccccatctcgccactctctaccacgccggtcttggccagcctttgtctgtctgatagacacacctggtgtctccttgtggcatgaatttgcatctgccttgattgcagtgaggttacagccttgcagccttacagactcgccttgtgtcgtttatctttctctgagtagtttgtaatcagcattcatcacagttctgggtgctgattcctggctgaatatatccatcgaaaatgcatctaatctatgactttttatgatgcctttggtgccacacaagcttaatcttttagtttctctttttctttataacttgggccttttgtgtcttgtttttcctattctcaatgtcctaaacatattctcctacattttcttccaagatttaaaattttccttttttgtgttcatgtcttaagtatatcctgaaccacattttgtctctgtggtgaggtggggatccaggttgtattttttctttatgccaccccagacccttcatcagacagcccgtcctcccgccagtgcttctcagcgtctccctggccatcagtccttagggtctgagtgggggctccattcttagcagcacccatcccatccacggccgcgccgacaccccacacagccgccccgacaccccacgcggcctcgctgacaccccacggccgcagcaacaccccacacggcctcgccaacaccccacggccatgccgacaccccacacggccgcaccgacacatcccacggccgcaccgacacaccccacggccgcaccgacaccccgcatagccaccccggcaccccacggccgcgccgacaccccacacagccgcgccgacaccccacacggccgcgccgtcacaccacagctgcgggggcagcacctttgagcccgctcctcagttcgtttctcagaactgtcttggccgctcttagccctttgctctgctgtatacatttcacagtcaggctttctgtgtcgacagcagcctcactggggtgttgtttgaatggcgctgaattggtggatttccctgggatgactgacttccttgcatcatgagtcttcctgctcctgaacagggtgtatctttccatttacttaagtcttctttatgtcttcaagacagtctaactttctgcataaaggtcacaggcatgacgttacctttcagtttttgtaattttaagtaatatcttttttaaaacctgttgctggcaaaaaaagaaagaatgccagtgggctgggcacggtccctcacgcctgtaatcccagcactttgggaggcggaggccgagacgggcggatcacgaggtcaggagatcaagaccatcccggccaacatggtgaaaccctgtctctactataaaaaaattagccaggtgtggtggtgcgcacctgtagtcccagctactggaggagaatcacttgaaccggggaggcggaggttgcagtgagcggagatcacaccactgcactccagcctggcaacagagcaagactccatctcaaaaaaaaaaaaaagaatggcagtggacatctgtgtttctctcttgagagtaaacgaaacctttctaaccttttacctttgatacgacatttgctgtagattttttgagtgggtgctctatatcagtttatagaaattcccttccctttggttcactctttttatgagtgcaaattcccattctattctagttagttaagaattttcctgataaatggaattaatttctttgaatgtattttctgcatctcagaatgaccctgtgcatggctgtttgttagggtagggaattacatgattgaatttcttgtgaaatatccttgcatttctgggggcacccagcgtggtaatgtcccctgacatcgctgccttacgctcaccagctatttctttgggcgctccccattggcattcacgagtgggttgggctgtgacttttcttgtcctgacctggctggtttagacattgagtctgtacctgcctagtaaaactggctcctccgggcatggtgacaggtgcctgtaatcccagctacttgggaggctgaggcaggagagttgcttgaattcgggcagcagaggttgcagtgagccaagatcacgccactgcactccagcctgggtaatagagtgagactccatctcaaaacaaaaacaaaacaaaacaaaacaaaactggctcaggagtgtaccctcattccctgtccaaaaaaactggctcaggagtgcgccgtcattccctgtcctcgggggcaatttttataagacaaagatgatgtgttctttcggtgtctgagtagaatttgcccctgaactgtctgggctagtgtagtgttgtgagggtgggtttgaattctgtattccatttctttaatgctgataggattatttacattctctatttcttcataagctagcttcaaaaagttttattcttctaggattttattcatttcagctaagtattctcattctttcccttgaggctgtctgcagtattctcatgagtctctaatctctgctgtctctttattgttttagctgcttttactgatattcccaatctgctgcctctttagatatgtccccgtttattcctattgttgtttatttgccttttcccctttttcctgattaatcctctaagatgtttgttcatttctttagtgtcttcaagttctaacttttaggctttgtggatttactgcattattttatctttatttttctattccagtactttattttgtttcctttctactgttttctctaggttcactctcttgtcctgttacagttctcaaacagaaaataaaaacagctcattaactttgagtttttcttccttcctaatgtgtgtgttcaggtctgcgggacccctgccccggctcccccaacccctgcccccgctccccccccgctccccccaccccccgccgccccgactccccccgccccggctccccccgcacctgctcacccaacccctgctcaccccgcccctgctcaccccgccgtctccgtctagtgagttttgatgatgggcttttcacttgtgttcagcttcaagctttctttctacttccattgtggttcctggggatggcggtccagccacaatgacagcagcgcatgacaggagcccaaagacccgaaacagacgcagggcatccgccaaggcagttcccaccgggcaaccctgtgggtgtgctcccagccttggccagctgctgccttgagcacctctggatagaacgagtccagagcttgcaccatgccctccagggtatggagaactgaaaggttcactacacaacaacccagacacgccagcttagcccagacacgccaacttgttaattttcattgagaaataacgttgcagctttgtgcatttggctgtccactaaaatatgccaagtgcccagaaagcgcagagttgactccgtatattcgagtataaatcaaggtattgccaagtcaccaatgaaatatattctaacgtcacttgtaagatgtttgttttgaactggaatacactttttaaatagaattaatgttacatatagtggttaggtttccaggctagcctgcaagagtcttttaaaacctgtctgcagaaattctacttataaatctacaatgaaaaaaggtatttaaaaatttttttttaagtactagaaaatgtaaattcatagtattctgttttgattacacatttcccctggccccggccacagctcctgtgaatagctctctagcgcctccagcaggttagtgccacctctgccccagttcacgctcatcaaggtcaaggtgatagctcccttccgtcacgtgtaggttagagcaggagtctgcaaactcttcctgtgaaagagctttgcaggtgggactgccccttggcacttccccaacactgccagtgtggtgcaaaagtagccagagaccgcgtgtaggtgaatgaacttggccatgttgctatgtaaccgtgtggactgaagtttgaattttgcgtaacttcacatcacaaaatattgttcctttgatttttttttcaaccacttaaaaagtataagaaccatacacaggccatagaaaaacaaggctgagttcagctcagagagcctgacagtagggcacaccctgcccgcaccctggcctccaaggatactcctgtgagtcagagggcttgggattctcccacggattggacagatattttgacagtgcccccactgtgcatgctggggcacaaaagtacagaacaggcaaacccaatgccacctgtgtcgaagccagtaccatcggctctgggcatctcccacccctccctgcagaagtgggcgtcctccctctgcagccaaggggaccggcgtttactcaggttgactcctggccaggagtcggggactcctctttgtgccccaacacatccttctctcagccgggcatctgtggccgtctcctccccgcctcgcagccacctgagccagcagctctggcctggtggtcgcagctctctcccgggtctccctgcttccactgtggccctcctggggccgtgtgctcactgtggccttccttttttttctgagatggagttttcctcttgtcactccagctagggtttaatggcgcgatctctgctcactgcctcccgggttcaagcaattctcctgcctcagcctcccaagtagctgggattacaggcgcatgccaccacacctggctaattttgtacttttagtagagacaaagtttctccaagttggtcaggctggtctcgaacttccaacctcgggtgatctgcgcgcctcagcctcccaaagtgctgggattacaggcatgagccactgtgctcgactggccttcttctttcacaggaagcgacagcagcatcacccctcggtgctcacctggtgaccgtctgccaagggcctggtggccccgccaccctacctggcccatgctccatggggttctcggttcactctcgtccctccactcacacgtatctggccatcaagtaagaatcaaaataaaaagttgcacctggcctgcaagtgtgcagaaccgcaccttttgttgatccaggaagctcaagccaggcagtgtggcgctgggtcaccatggcaccattgagagcttccgtctgcaggtccccacgcccacagcacctccctttccccctgggcatttggataccacatgggcatctccccttctgctggcgaaggctacagaaagttcacagctgtggagtttccaggtggctgaacttgctgaggctgctgtttgctgtgcgcgtgccatgcctgaggccctgggtgctgtccacaggcaagagggactgcggaggccccgcccaactcctgtgtgaaacttagctcttgtctgtgatgagtgaatgccgttgttatcctcggtactggtctcggtggagtacagggcgaagaatcgcagtttcatttgagggccacccagacgggaagcacacagcagcctggggcccggacacaggggcttggcctccatgagttttctcctctgccggttctttcttttctgtcttctcgaaggagctggactccccattccaccatccttcttatacaatgtgattcctgacttttttttttttactggagaaaactgagttttattcgtatatcattcaaatcttaggaaatttgacaggaaagagtttcacaatgagctggagtttaggaaggaaagaaaacaaagtcgcccctgcaaagccagcctcattcatattcagtgaggtgtcactcacaccacctggaaaccaccgtgcttacctaagtgtttagaagtcataacttacacagaatcccattgtgcacagcacttccctgtttccagccaatttcttctttcatttcagccaaagaacagcaatctctttagtcctttcagtgaagattgcagaggctttcagaaccatggcaacctggagagtccatgtctccccatctttcctggtgccccagaagccctgccccagcgcctccccatctttcctggccccccagaagccccgcccccagcgccctccctgctctgccttccccagagcacttgcattcttacaccctcagtcacgtgtttcctttcttccccgtggcaatgaagccccttggctggtacttggcttcctttgatcgctgatggagcccaggttcccccagcagtgcctggccctggtggggcaggataaatgtttgtgaaactaaatgggaacccaggtctcagcactgtgtcaggttctagaatcttctttgatgtctccatcctgcttgtttctcactcagcccttcgtctggcctgacatccacaagaatcccctacctcaatccctcctatttccagtgcccccatcccaccaggcctcgttgccctgggtcttgctctctgcagaccacaactgggcaggccctctttcacaccagctcctcaccaccctccaggtgaagccttcgttaaaaccgcattttctgtagaggccaaaccattgtctgacattcaaggccttccttcagcctcctgccccccgtctcagcagcagccgctccactgcacctgcccgcagcacccctggctggcccctggcccggcccctctgccatccgtgcagctcagagccaggtggtcttgccgggaggttgcctggcccaccgccaggatccccatgtaggtgcctgacccagtacatcaaagcatgatgtcgccatttttaccaccacagtcctataaagttgtttcttgctaacgcatggatgtgtggacacaggcctcacctgtcccggcccccagcccatgcgtctgccctctgcacttatctgtgttcctgacggccacaagtggccgtggagctgctcaggatggaaggatggctggagacggtctgtggcctgtgtccacatgtcccgggacccagcctgaggtgccctcctcacccccagacacccatgcatgtggccccacaccatgtcactcccacgctcatccgtccagccccagctcccagctagagtgcagtcccatgggggaccacgctgctgtgtgctccacccgccttccctcccgaaaccctgcgtctcggccagagtccaagcacacccgtgctgagaggcgaggcgggagttaattctgctcgggactctggtggcctgagaaggctcttcccgcagaaacagcctcatcccgagagcgctggcaggaacgcagatcagaggcctgggctagatgggaccagttttcacgactctgctagatacggtgacattttttacggttttgaaaatgagttaccatagaaatggatccaggatggactaatgcaagggaggggagggcgagaaaggaacacagccctgcggagcctggagccggccctggtgcagctgtggcaagcgccctgctcacccagaggaggagctgggggccctggccagcggcagagccagaagccccgcaggccgcctgtgctctccacacctgaacacgggattctgcgggagagctggtgtcaagtcctgacccctctacttcgttccgaatctgggagccagaactactgcctttggaggaaagaggagcccggagacccgagcccagaaactggggcactgcccggctcctgggaggccacagaacagtggcggcccctgcaccccaggcctgcccaggcctctcagccgcacacattgcggccggctgcactgcggcatcattggtgttcacaggacgggccatagcaactgcttctcccttggtttattttttaatgtttcttaaagacggggtttcgctgtgttgcccaggctggcctcgaactcttgggctcaagcaatcctcccacctcaccttcttgggtacctagaactacagtttccttccttttttccaaggcatcgagaagctgaaagagtccttacaagccccgcgtgcagctccagagacccccagtagtgagttccggccaggcctcgaggtctgggtttcagggcagagaaggtattggtttctgcctttgcagaaaaaaagcctggtgctcgctcaaccaaaagaaaagctaggcagggtttttgccaaaggaactgtgtaggtttggaaggaaaaggcttcacaacccagaaactggagttactcttgtcagaagacggtggtgagaaaatgaacaacagttttccaatgctacaggattatgtttttaggacaaaagtccttaactaaaggccattatgatgtttgtctcgtaggggtactgaatatgctgagaaaacgatgcagacgcaccgcccacccggcccgggaggtgctgcgtcttccctgtgggcagctgcagggcccacggctccggccggcccaggaggagggagggcggagcggctggtcagcgtgattctcgtaacagccacaccgagttgtgggtgcagcccctgaggggtcaggaggggtcacaggaaaggggccgctgcggaagccctcggcctggggcactggttccccaggatggcagagggtcttggccatcacagactgggtgagcacatcagagggcgtaacccgctctgccaacccctcagccttggggtggcggctggcagctgtcacctgcaggaagactctgtcttctctgaactgctccgacagccggggagcttctgggattcagagtcagccagagctctgagtaaatttccccgccgtgtatgctatttggaaagctgtggccattgggctctgaacaataacttctaaaaccattcattatgatcttttattacttttagtctagacatgaaaataggttctccgtgcttacagggagttctgtgagtgccagcaggggccctttctaagctcaacatccccggtccctgactccctgccgggcaggacccaggcagccccacctccttcctggtggactcgaatccgatgggaagttctctgcggtctgttttggggactggcagattttacaacaggacagttcatacaacggagcctgagagaagattgtggccaaaccagggaaagacgtgaaataaagacagcagttccgtgatcacagcgtcatactttttactagtacatagttataaaatccactgtcactaaaaagactggcaaaaattagatttttttttcccctgttgagtcgcaaacagtatttcgactttgatataagtggaagtctgcacgaaggtcgacaacaatagcgttggccctcggtacgcgtgggggactcaagggcccagggcccacgacgctcagtcctgctaggaaaggcgtgacagctgtgcatcccccacacacatcccccatcgtgcttgcatcttctctagtttccttataatgccaaacccagcacagtgtgtcaacagtggttatgctctcttgtttttttttttatgtgtattactttttgttttgttttcaaatattttcgatctgcggttggttgaatccatggatgtagagggccaactgtaataaaaatctgtttttaaaaattagatgaaagtggccaggcgcagtggcgcatgccggtaatcccagcactttgggaggccaaggcaggtggatcacgaggtcaggagatcaagaccatcctgcctaacacggtgaaacccgtctctactaaaaatacaaaaaaaaaaaaaaaaattagctgggcgtggtggtgggcacctgtagtcccagctcctcaggaggctaaggcaggagaatggcatgaacccaggaggcagagcttgcagtgagccgggatcgcgctgctgcactccagcctgggcgacagagcgagactctgtctcaaaaaaaaaaaaaaaaagttagatgaaagtagcagctaatacatctcacacacacccccaccccgccctgcacattgccagggtccttacctggagtgtcctgtggagccctgacctagaccccgggtgtccgcgtctgtggcccccacattgtgggtgaggcttgagcagccaccagcctgcaccctcctcgcagtctgccagggccgccgggagtggggggcctcctgccgtgcctgccctgggttccgggcttgcccagtgccctattcttcacagtggcctggtcctcacccccgggtcttgtgaggagggttctcatataaggccagctgcccctcacagccccttcacggggcagtcgagcctcgtggggagctgcttcaatgcctcactcagctgtggggagcccaggaccccagaataatcaaggggagtgggtctcaggtgggcagtcatcaacgggcatcttacggggccatcctgtcacccatgttagagagtgtcgtggagctaggcggtagcgaacttcgccagtgaggccgcatctcctcctcaccagggcctgtcgcgggagggaattcaaagccaaatctcctagcccacccacccactctaaaaaaaaaaaatgaggacgcagccatcgccgatgtccttgtgttgcacggagcagttcctaggagccggctccgctggggtagaggagactctagggatgttcctacagtctggaccgattttacatttccgagacttgcttgtggatctacacggctatcgcagagctgtgcaatctgagagctggaaggcttcggttctgtcccagtacacgcggtgcaggaccacggttgagcagaaggtgcatctgcgtggcaccgtggcgctgaagtccaggtgtgcttgggccctaggctcccaagacgttcccactgcctcctcctgggcacaaggctcaagcacagggaccgccggccaggcacacatgtgtatgggcaagacccgcaggggacgtgtccctgggaagaatgcttcctttggttgaaggctgtaaactcgccctgtgaggtgagacatgtcagctcccagaaaaggtcccagcctctcatgattcacgccagcacaggcagcacagcagcagagcgtgacctcctagatggcagcgtgacctcctagatggcagcgtgacctcctagatggcagctgagctcaattccacacggctcagtcctggagacaatcactcactgcaacacgcattcctcatgggggcctcttcaggagccacgggcatggggcttccctgacctctgcactcacggtgggggcgcgcacagcaggggtagacactggcccgccatatctggagctgaagtagagcccgtcttgggctcgcttagcggagaccataggtggaggtgagccagtggcctcaggcatctgcagaacccacgcacacattgactttcgcacccgcctccatctccgtggacttgactgtgtcgtgcaaaacccactccacgtgcgcagctgtgttcctgcagtgacacgaggccctccactggctttcgatgcttcagctctttcaccaacaatcaggtggactggaatcacacctcactcgaaaccctttgaatctctatttagtgaacaagcacttgcttctcagcaaattgtctagcttccccaaaaataaagaagatggagttctgtgtggctggatcccttttcagctcccagcactgagggcagggccctgtctgcctccgcctctgggttgaagcctggcagtaaactggcactcctggtgcccgcaggcaggggaggcagcgcctggccccgctctgccctccacgctcagcgcctctggtcctcggcccagcccttgctggacatgcagcctctaccaggattgctgcttcccttctcggcctctctgggtccagcgtggcgtggacaacagttcggcaatgcctgctccatcagcctcctccctggcctcagccaatgctgactgtgccaggagcccacatagcccgtgcctgcccccccttctggtttccaagtgctcacagcctccaccccacaatctctgattggctcctgcaggcttccgtcaggtatcccccaaggctccgcgtccccatcacctccgtgttttattgttcaatgtcttagatcttgtttgtgctaccccctctcgctccacccctcctttgcccagagaatgatcctccttcccttcaaagcccagctccttcgtgcctcttccaccaggccttcctggccttcacttcctagcccactgctgacagaaggagtcactctcgctccttcctgcatctccctgaggccgcacgctgtcgtggacgtagcatggctcaaaggtttgatgggtgtgcgttcacatccttcatcctctgggcctcaccttccttggcgacgctgggggtaacacctgcctgtaggattgctggggaattaaataggaccgagcagccgcaccgacgaatcctcaccgacgaagcctcagcgcttccctccatgcccacgactcaccagtgttatttataaatgagtctgagtccctgctgggtcctgccttgtctgtctttgtatccgagtatgcagcacagaaccttgcattgagtgttgggtgagtcgggagaggcttagggacaaaagtcacagcacatcaacctttcgtgaagtcctagcatctcagagcagggccagtgcctggaggtggacaggaagcacgtggaggtgggcaggaagcactccctgggtcacagtgcacagcagcacgtgctgaacttggtgcagtgcagacgtccatgccacatgcaccactacccatgggctgcggcagctcctagaaatctaggatgtgacatcagacgctcctccgggagtgtggtcatgccctccgatccgctgaggcatttcaaggaaagttacaccctttccaacgcagttttccttttagaaagatttggcctcagtagatgaatccatgtgatcaagcctagtgatcagctaggattcttgaatctcgggacccgttgccagaataacaaaatgggggcttcctgtaacctcggctctttaaagcaacacttctgataccagggttagggtttcagaaaatgcagccgccttaggagcctcattggcagctactttccactaaaacatcttccatttctctctctcaggagtttcctttaacagtgtttacactcagatttggagagtcctgctgcacctggctgctgacccctatccagaggtctcggacgtggccatgaaagtactcaacagcatcgcctacaaggtacgtgccgggcgctccccaccgcgctccagctgctggttctcggttacgagtatgcatgccaggaactccaggtgtgcccgggtccacaccacagtttagaaagtaacaaaacgagcttcagcaaatatcttaaatctggagatgtacacagtacaccccaaactgtgtctgtgcagctcccacgtgggcagagggtgctggatttactgatgcctgtcaaggcaattaggggaggactgacattatctttcaggatcctctggtgtctgggtgagctacagtgctggcccttcttccattttttttttctttctttacttaattatttataagagatggggtctccctgtgttgcccaggctggtcttgaactcctgggctcaagggatcctcctgcctcagcctcccaaagtgctgggattacaagcgtgagccactgcacctgttttttgtttttgtaagacagtctcactctgtccagactagaatgcagtgacctgatcacggctcactgtagcctccaactcctgggctcaagcaatcctcccacctcagccttggaagtagctgggactacaggtgcacaccaccacacccggctaatttttaaattttttgtagagacagagtctcagtgtgtcgcccaagctggtctctaactcctcagttcaagtgatcctcctgccttggcctcctgaagtgctgggattacaggcatgagccaccacacccagacttttcttccctttctgatagcagtaatttttgactcattcaaaacccttctagttaatggtttcttattcatggccattctagctcaagggaacttttcaaagaatcagtttttggtttcattggtttttctctgttgtttgtccattttccatttgattgattgagctttcatcaataaagcttgctttcttctgcttactttgagtttaatttgctcttctcatcctagtttcttaaggtagaagcagaggtcattgattttagtcctttctctttggggactgtaaactcttctcagtcccttttgtgagctctgggcatttggcctaccgccttcccgctgttttttctctgcctcatgggttgtcactctacccttgagcagatgaatacttagtcaaagaccccaggggcctctcctgcagaccttggaagctttcccctctccagtgctctgtcctgcaaattgtcaccacctcagcctccctggagccccagtctctgtctcctgttccctgaaagtgctgggctccccgtctctgcactgtggcctgggactgcctgaaactacctgcaagccggacacagggcagctgtttatttccgttctctcagggatcacaagcccgtgacacccagcacccagtgtccaaaaacaattgtttacggtatttgtcctggttttctagttgcttatggaagttggatgatttatgtggaattagaagtcactcattatagcacttaaaaattttttggtaactttttgataaaacttcaaaagcttacagaaatgttgcaggaagaatgcagggaaaggccacactcttgcagcctctgtggtgttctacgtcttcatctgacctcgtcacggctatggcgttgcctcgggtatcactcagtgccagggtctgcagggtcgaggagccacggcttcccatcctagtccatcgctttttccaaatgagctatcgagtctccccctctcatttgctgtggccttctgggtcctggccggccatcgagccagggttcctgcagctcctcagctccttttgctgatattatacttctgtggctttcggttccttcaactaagttattttctgttggtctagttatatcttagatggaaatcaccttaccgtctgcagttggttcttcttcagttctttttttttttttttctcttgctctgttgccaggctggagtgcagtggcacaatctcagctcactgcagcctccgcctcccaggttcaagcagttctgctgcctcagcctcccaagtagctgggactacaggcgtgagccaccacacccggctaatttttgtatttttaggagagacgaggggtttcaccgtgttggccaggatggtctcggtctcttgacctcgtgatccgcctgcctcggcctcccaaagtgctgggattacaggcgtgagccactgcgcctggcctgttctttatggtatcaccggtatagtcacaagtagcctattggccaacttggaaaggtccagattgtttaattctgcaccggcctcccctcctgcagcggactctgccacttccttcgtcaccgcatccctgcagcggattctgccacctccttcgtcaccgtgtggtgtggccagctgcacgggcacctggagacgttcatccccaggcagcaggccatctcctcaggtttcttttatgtgctactggcctgttgaaaatagccagtcaattaagttaatgttttcattatgcggtaagaaaactaagaaataatataattatttgcttttaaactaggaataagataaatacaaaaataaacctcaggctgggtgtggtggctcacacctgtaatcccagcactttgggaggccaaggcgagagacgatcacttgagcccaggtgttttgagaccagcctgggaaacatagtgaaaccccgtctctacaaaatagtagcaagttagccgggcacggtggcaagcacttgtggtcgcagctacccaggaggatgaggctggaagatcccttgagcccaggagctcaaggctgcagtgagctatgattgtgccactgcacttcatcctgggcggcagagtgagaccgtgtcttttaaaataatgtttaaaaatatatgtttgttacacattatggtctgagaccaagaaggggaggcagtaaagcagacaggaaggaaataaggaagaaaagaaagtcataagactgcacaaacacccctgaggaaaccacccacggaggccccagaccagagcaaccggtcccgaggcctctcagatgagctgacgctctggaggattgggactgaaaccgtcacatctgcctgctacggattagggaaaatcagttcttaccacttaccactgcccttttagactctaaatagcctctaccacttttagtttaagatttcaaggttgggttttaaatagccgttttcactaaaatagttgtaaaagctttttacgaacattaataaatggtttaagtttttagaattgatggccagttcgcgtctctgctggcagttctctgacacacaggagtgtctggtggcctcttcttttctcttggaggcacaggatggctgtggccatggaccacccttgctctgtcctgactgcacagttggaggccagcgctatttaggaggtttgatcgttttcccccaattaatttagcttcttgggtattttgatcatgatgaaatcagtattcagcctatttaagtttatttttcagtggcttttgtgtatttaaccttactgaaaaattagcctgaattattttaaactgtaatccgagtgcctaatcttgaaatataaggactattaagtgcgttcctgtggacctggcctccagttgttaaatagctcctcttgggaagctctcgagcctgtgtagcacagaagccactgctctctgctcttcagcaaacgtcccagcacagcctccacagcccagcgcccttttggattgtgtgtgacatgtagtgtagctggacggcccgcccccctctcccaccacggtaaggcagttaagcacctgcgtctgcctttcatgttagcaggttatagcaactcgaacacacggctttgtcgtgctatccgattgagacccagaaaccgccataaaagtggcatttgccttctgtgcctgctttgccgttctagaatgacacagagaccttaaggcacatggccatcactccagcagacatgccacagccagaggggtggagaaggtcaagagaaggcctctgctagagaccttgctatgcatagcacaatgcagcatgagcttgtgtgtgtgtgtctgtgtgcgtgtgtgtgcacgcgtgtgtgtgtgtctgagtgtatatgtgtgtgggtttaagagtaaacattgctactaaagcatttggaagcataaatctttcttgtcttcattttaatttcaagaaatgccttattttcctgctctaggaactgaagggattacatttcattttacagagaaacgagcctattttagatatttaactctgaagccaaatttttgttcatcagagtctaaaacagccttattactatggaatgccctgtagaattctatattcaaatacagaaattgccaccagctctgtatgagagaacccacacagctccagagctgtggtctgatttcatgtatttataatatatttcgattcccattccatgggcttggggttttcattttgcttttagctcccttttctcttggtttagttttgggggtgttgtttgtttgttttgttttgagacagggtctcactctatcacccaggctggagttcagtgatccagtcacggctcactgcagcctcgacctcctgggctcaagcgatcctcccacctcagcctcccaagtagctgggactacaggggcgcaccaccatgcctagctaattttcgtattttttgtagagatggggtttcaccatgttgcccaggctggtctcaaactcctaggctcaagtgattcacccacatttccctcccaaaatgccaggattacaggcatgagccactgcacctggcctgcttttaggtttttttaaggaaaatttcagactatgtagaagtagaaagaagagactgatgcccctcaggagcctgcctgtggccccagcagttctcacctcagtggttttaggacaatgccaagaaagaaccttcaagccacaggtggtcacctgtcagggcacatgttctcatgatcactgcttatattataatttatgagaaaacgtgtgagcataaatgcacaaactcacctagaagcaccgctgcagcctcttgatactgtgaagagtgtgtgtgcatgtgcgctggccgctgcctctgttgcaggactcatgcatgcagacggagatgagaaaggggtgtacttaacgaaaggtcaaattgatggcagtggcagccagtctgggagcggccactgccatgatgccagctacagctggggaggtgtggccagggccgtgtgctccacaaagctggcaggaggcagggaccggtggaatcccacccccttccaaactggcagggtgggagcctcatgctccccaggtgcagctacagccacccagccacaactctggatccaggcatctctgtgctcttgggggccgggagcaggcaggaaccccaccctcccaggcacagctgcagccacccagccgtggctccagacccagccatctctgctcttggggaccaggagcgggcaggagctccaccctcccaggtgcagctgcagccacccggcatggctcctctgtgctctcaggggcccaggaagtgcccctacccctgcaggcttggaagcgtctgctcccgctccctggcctctccctgctcctggcacccacttcaatctcggagcaaagttgaggctgtacccaggtgctgttgcaaccagccggctgtgcacacgctcggggcagtgctcacatgccaaccacctgctatgtcagccccctctggactttgggcaccaacgagcatgggagggaggctgagggtggggactgagggcagtttggcactggcctgcaggtgcccctcggcacaatcagcctgggtgttatggatgatggcaggaggcagacagggtcctgggcagaaaggggcaggtccccagtgaagtgccaccttcaagccagggacagcctgaagcctgggggctgggctgatggaccagaatgggaacttttagtgctttttccaagcctgcccatggctgcccatgaatcagtcagcacatacttcctcccctttgaagcccataaaaaccctggactcagccagactcaaggaaacgatggcataacctgccttcagaaaggagctacccatgccggggtctcctctctgctgagagctgagcagacgttgggaaaaccagctgcagagaggagctgcacactccagggtctcctctctgctgagaactgagcagacgtcgggaaaaccagctgcagagaggagctgcacactccagggtctcctctgctgagagctgagcagacgtcgggaaaaccagctgcggagaggagttacccactccagggtctcctctctgctgagagctgagcagacgtcaggaaaaccagctgcagagaggagttaaccactccagggtctcctctctgctgagagctgagcagacgtcgggaaaaccagctgcagagaggagttaaccactccagggtctcctctctgctgagagctgagcagacgtcgggaaaaccagctgcagagaggagttaaccactccagggtctcctctctgctgagagctgagcagacgtcgggaaaaccagctgcggagaggagctacccactccagggtctcctctctgctgagagctgagcagacgtcgggaaaaccagctgcggagaggagctacccactcctgggtctcctctctgctgagagctgagcagacatcgggaaaaccagctgcagagaggagctacccactccagggtctcctctctgctgagagctgagcagacgtcgggaaaaccagctgcggagaggagctacccactccagggtctcctctctgctgagagctgagcagacgtcgggaaaaccagctgcggagaggagttacccactccagggtctcctctctgctgagagctgagcagacgtcgggaaaaccagctgcagagaggagttaaccactccagggtctcttttctgctgagagcagaacacttatcaggacagtctgcctccggagaggagctaccaactgtgggtctcctctgagctattctgttgctcagtaaagctcctcttcagcttgcttaacctccacttgtccgtgtacctcattcttcctggatgcaggacaagaacttgggacccaccaaatgtcagggctacaagagctctaacacaaacagggctgaaacatgccccttgcttgccactttgcagatgacaagaaggagagaagagaaaaggagagaagagctgcagcccttcagggaacccagacctaggagctccctgagatagggctgtgatgccatctctggggctctgcagttcctggcgtctccaagcttccaggtgccaccacgttccccagtgccagatgttgaagctgcttgtagtacacctggcccagccacagccttgcagggagcaggcacccatgccagtgcctagagctgcccacccccctgcagccagcatgcatggctgcgcacagtggctggaccccacattcactctcacacccctcaccactctgcgcctggcttgcctttggcaggtgtgagatgcgggccagcagtgtgagccaagcgcagcctgccaggctgaatgggcataacaagcccagtgggtccaagtaaaaactcgggcaaaggcgtcaccagccacagaggtttctggctggcaaagcaataccccaaggatcccatgacattttgatttacttataaaatgaagacctaagttactgataaagtaaataaacattggccgagtgcgatggctcacacctgtaatcccagcactttgggaggccaaggcgggcggatcacttgaggccaggagttccagaccagcctggctaagagtctctactaaaaatacaaaaattagctaggtgtggtgatgcactcttgtagtcccagctactcaggaagctgaggcacaagaattgctcgaacccaggagacggagattgcggtgagccaagatcacaccactgcactccagcctggcaacagagcgagactcttatctgaaaaaagtaaaagagaatgaaaataaagattgagatatccaggaaagcatattccaaagcaccaaacatcctaagcctgatgcctggcttcatgctttcgtagcatgagttacttatggataggtttcattttttttttttttgagactgagtctcactatgtcgcccaggctggagtgcagtggcgcgatctcagctcactgcaacctccatctcccaggttcaagcaattctgctgcctcggcttcccatgtagctgggattacaggcacgcgctaccatgcccagctaatttttgtatttttagtagagacggggtttcaccattgttggccaggctggtcttgaactcccgacctccagtgatccacctgtctcggcctcccaaagtgctgggattacaggcgtgagccactgcacccggccatggatacatttcttttaaaatcacattgtcatgccagaattttctctcctcctacttgacagcctctcttagaacccagagagcccggtctgtgtctccctaccctctgttctctcaagctgcctgaatcgtaaggatttcttaattcagcatgtttgcaattaacctctagaccaaagtagttctgcactgctaaaactgtctttacctctgaaattctctgaaatttctcttccagtgatctcagccgatctgcatatagatattctgatttctttttaacctcgtcaaatggcatttccttaactgagacagacagttctctgttgccaccgtgatccctccctctagaactgcacctctctgaagccattggactctctcccagctcagggcccctccgggaatcgtgagctctacgtccagcccctgaaggccgtgctgcccatcccacccctgcctggtttcagcggtggcctgctgtgtggaagtgtctgactgcctctcccaccaagccacgggcgtgcacaccctctgcatcctcagcaagcgttcacctcacctgtcttagttcctgcacctccaccacaaggatggatgctcagaacagtgggatgagccgccccaggaatgtggcatgccagcagcactaatgaacatgaacagcctggacacatgtcacacctatggcttgaaagcttgtcatgcacatgctcattcccctcactgcagacctggggaacgagggcagcatcagcctggactagcatagctacagaatcagatgtggccctgccttagagccacgctgcccaatgctggcccgtgggcccctgcccagctagagcagaggcacccctggatcgcccatccagacagagatgccctgttcccctgcggagatgcagactccaggctctggggtggcggccgggaatctgttctcagtgagacagtactgtgcagctgcaggcagcggctgccccacgagcaccctcgcgggggtcatagccacgagcaccctcgccggagtcatagccacgagcaccctcgccggagtcatagccacgagcaccctcgcgggggtcatagccatgagcaccctcgcgggggtcatagccatgagcaccctcacgggggtcatagccatgaggcactaggttggctcttggagcctggggctccttcaggcaaggacaagcaccagctttgccctgagccccattctagttctgctagctttcagccagtgacttcatgcctctcagcttgcatttctcctctataaaacttaaaactgggatcattgtatgactcccaccccctagggctgtggtaagaaaggcagagccccgtccctgtgctgcctgggtgcagcgggggctccatacagcaagctgcatcgtcagcactcgtgtctgtgtcctgtgccgcccaggtgcagagagggctccacacagccagctgcatcatcagcactcatgtctatgtcgccatcagctccttggccatctcaccatcctctgtggaaaaggggccacagcaactccagaacctcccgagccttcccacacacccgggtctgaggagggaaggagctggtgggctgagacacctcggcctccactgacgcggcgttctcttcccgcagcgcctaggactgagggcaccgtggccccaagtgaaattccttaaggcttcctttgtaactaatgggcatcttgttaagagtcaccacgttgctttaatggaataatacctaggacttacttttccaaaagaagagttcgtaggatttatctaggaaacgcagtttgcaggaaaatgacttgaagaaatagcagcacacgcttttgcaggggtttcttctcccccaccaagcagccagcggcctctgcgctattcttagcccaaaagtgcctctggataatcctctgggaatccctttttaagagtttctcacacatgaatccagatcctcgatataaaattaacaggaacatttctgaaatactccacttcctcccaagatagagcagccagaagctgacgctggcatccgcagccctgactgtgtcaagatccagtgggaaaattcactgtccaagtctctgaaatgtacggtattttcatctgcattggatcagacgcccccgtgtccttgtgaggtggcgctcccggaacaggagacagggtgggtctcattccagtccccgcttcagcagctgcaacagtcgggggtggataaaagacacctgcacctccatcttccaggcgtgttcatgtgcgcactggcccaagagagtgtctgtgctgagcattcgactgttagcaaagtcgtatctgccaccaccgaaggttggcttggggagtggaagaaaggccctgtcttgtagccgggaccttgaccctcttacagctgccgtcctctctggacgcagacctccctagagggcatgtttgcacacccttgacctctgcaggctgcgagtgagccggggctctgggggtgtacatgctgagaagggcgccgtgtcctccaggcaggcctgggcccacagaggctgtgcgggccgcactcagccctccagtttgcatctccaaacccagcctctgccattgccgtgccctctctgttcacccttcctggtgctgcgctctctaagatggtggcagggaccagcagaaaggactctccctggtcctctgcctttgcccctgccccagccagctctgcagctcctgctcgctgcgtaccctgtcctcacaccgacaccgcaggcaggcaggtctgccaggtcacctctgagggacacgctactcatgttcacaatcttggccccacacccagcgcaatcaacgctgagtaaatgttgaacaaataagaagtgcacagctaaagaaagctccctccaggccaaccccctgtggtcactacactaatgggggtggggggggctcctgatccaggtgtgtgtctgtctcacgagatttccagaagtggtggaaaattagttttgtgacagcagccccaggtacaagccatgtgaaagcaggatggtctcatcttataaccccaggggctgcgagaattcatgccgaggcccggatcagttccctgcctggaagagtgggcagagcagagggttcgtcaccacggctccatgcggtactcccacgggcgcttccgtgcagggtggcaaggcgggagctgcacagaccccaggcggctcagcgtgacgtcccagggctcctgagtcaccggccccagcccagcagcgcctgagcctttgtgctccgtgagcgtctgagcatgtgtgggttttgctaaaggcttcatttcaactccagaagttttctgtcttccccgtcacctcccactgtttttccagacattttgagaaggcacatataaagttcacagtcgaaaacttgcttttctctttttagacttttgaagggatcatatgtctggcaggttctgtgggatggttgtatgtgtctagggctggccgaatagtttaataccaaaacaaaacaagctcagaaagaacatgtattactcttgtcatttaaaaaataggaacgttgcttaaagacaagttatggttccattttcttgctatttgcgttttgaaggaaaggacaatctgggaagcgtgggtgttacatgagtgaagacttcaggatcgttttgttttccttggtgttctgttggctgaattgcaggttcaaggttcctaaattctaagtgaataattaaaagcatgagacattgcaggctccacgcggatgcggacctgaaggacagggttctgtctggctggagcgcagcctgggatgggccggcgctcagggaatggcttgtgcctgcgggatcagtgggcaccttcatggagcagctggccccatcctcctgacacagatgaggttgccccagcaccatcaggccccttctgaacgcgcacagcctctggagtccagaacccagcgggacccgcattccccccactgagcagtgtactcagaacaaaaccaccccgaagcacctgggccctcgcgaggtcatgtcggtggccgggcagcgcacgccctgccttgcgtggtttctcacggctgctcactaacgccgacagctggtctccagatccacagaaaaccctgctttaaaaaataaaagcaaaacctcttgcctcctgaatgccagggctcaagctggtacaaatctttttctgtggtagaatttcaagccctgcaggtgtctgtggcaggaggctctcagagcccagggtcttggcttcatccacagacggctgggttgaaggggtggtttggagcctcatgctgcccactaggctgtgccagctgtgcaccaccctgctccccaccctccgggagcagccatccccttcccctgccagtgcgcccctccccagggcaggtttcagccatgtctgccctggagatgaaggttccccgtccatgcagtgcacccagcaccacctgcgtgcgcccgtgggaaaggatgaccacagcccctcggccaggaggatgttaagggcggtcttgagttccaggccccgtcacagtccaggcagcagagcccattttgccactggagagagcccaagccccctgcagtcattctctgacagtttctgtggcctcctgaagcacacgggggtgtaaacagtggcctgcgtggaggcctcaggctgctggtggctttccaccccgtgcccaccggccaggtcccgggtggatgaagcactccctgaccctccgtgaatgccacatcgcccggctccggaaagagcatggctggtggattcttcccgggcctcaactcgcagcctctgacccgagagctgaggtgttggggagaattggactcaaggctgggacagtgtggaggcccagcctcaggcaagggggaggacactgaggccgccaggagccgcccctctggcagggaaggtgaggagggtgggccgtcatccatctcagaggcttcaggccctgacccctcaggagcctcaggcagagcttcctccccagacatcccggctcacacggccacgccagggctagcccagtggatgcatgtccaagagtaaagaataccacttgagcttcaggattgcctttgcgggggatccagctggggccttccattggtgttggtgcttcctcggccaaaggccttttctgtgattctgaagcggctccacgccagcctctgcttcgtgtggcggcctccgcggagcacgtcccgtctgaccttcacacccccattcctttgcccctaggccaccgtgaacgcccggccgcagcgcgtcctggacacctcctccctcacgcagtcggcccccgccagccccaccaacaagggcgtgcacatccaccaggcggggtaagtgccgcccgctcagcctgcaggtccgtggtggtgaccggggccccacgggctgagctgtccctgagccggcctccccatcctcctccttccccgccctgtcttggcttcgtctcctcccccctctccagcgggcgttctttccctctccctcccggacaccccggtacccgcctgatctgagccctgccttgagctctccccatcttgaggaacccttcatgtgcacatcatctcagcaaaagttgaatgaagcctggtctctgtggcctttcagagtttgtaagaggggatctagatctccaaatgggtaaccaacaggtgtttgcacctcaggacgtggcactgctgtgtgctgagctcgcacatcccggcccactcgactctgagctgggttcgtcctgtccgcgccacctcccagggtgctggagttcaatgagggacaaccctgccccctgccaggcgggcaaccgagcagcatggactcggcaccagcagctggggttcgggagccatgatggcatgctgggtgactgaggacaccccgggccctggtggcacctgggagggtgcaggtggcccaggaagttgttccatgttccctctcgaagccccagactctgcagaggatgcagtgtttgtttttcttccaatggcaggggctcccctccggcgtccagcaccagcagctccagcctgaccaacgatgtggccaagcagccggtcagccgagacttgccttctggccggccgggcaccacaggccccgctggggcgcagtacacccctcactcccaccagttcccccggacacggaagatgttcgacaagggcccagagcaggtacgggagcccggctgcctggtgatctggacactgagagcgttgcttctcagatgggggctcatggcctcagcctcaggctgctcacatcaccatgggatggggcaggacccaccctgccgtcctgggtctgtgggccactctctgcctttgcagacccgggtgctggtcctcactcgtgcacccctctgcctgcactccttaggagcactgctgggtgtgtcccggtccctctgcctgcactctttaggagcactgctgggtgtgtcccggttctccgcccctggttctggtttcaccattctgggcagcttccatgtaacgaaacaggagcacggagttacctggctctgcccttcctgggcacacagcactctgcgtccgcttgggggcagctgcactgcagagcatttgttctgaatgtgttgtcttttctgtgaacatccaagtacgctgcataaataggtacactctctttgcctttaactaagttgaaaaagatatttctggagagaggaatgcctgctttgttttgccagggttatgagagtggtgtgaggtggcagctggtccggagacctcggctgtctcgtccaggtgctgccactttgtcagttgagggcacctgggctcaagaaggtggttcagggcgcacccagcacacccagctgctctgggtgctgacagcatgatcatctcagcaatgagtggggtccggggctcgcttggtaatccagtgattttaaaagaagttagcggccgccttgcaggatgccctggagcaggaacggccatgttggggtagaagagctgtcacggcaagagcggacaggtccccacaggtgctgctcagccccagcccacctggactttccgtgtctcggcagaggaggagcgagaatcaccaccgagccccaagtgcagggtcagcctcctggccaggccctggggagcaatgctaccggcacgtgcagctcacccacccgaccccccggggtgggggggatgcacctctcactgcacctgccctgagatcatggggagctccctgtgccaagacacagcgtgagagacgccagcaggccacatggcgtggcacaggagacccctggtgcccagcctcactccacaagcacacacagactctgacagccctggccgccacaggttccacaacaggaaacacccaaagctcagtcctcctcagctccacatcctctttctccagtagctgggagctccagccggcctgcaaagctgtgcgctccgtccaggccacttcacatgggagtccccgctctcagtctggtgtcacggggccatcacaggagctgtcctggaaccaagcggcagaggctttttgggggttgataaaccagcacacatggacgcacgtggcattgtctgaacagtcagttagaattgacttgggagctgtgctgggtcggccctggggatggtgggaccgacgtggctcacacttcacagcccgggcccctcaatccctggccagacgttcaggggttcttggtcaccaggatacggaagtgagcagagcacagaagtgccgtccttaggggcagcccggtgctcccggcagcgcctttgtccccagctgcagctcttttgagctcaggagtggcatgactgactggtgtttctttttccttccaaccctcctgcttaaaccctgaagactgcggacgacgcggacgatgctgctggacacaaaagtttcatctccgccacggtgcagacggggttctgcgactggagcgcccgctattttgcccagcccgtcatgaaggtgcgcccggggtgtggggttcagagtagagtcctagcgaacatgtgtctgtcccacttctttgagcataaacgctcaaggcttgtggctgtgggagcgtcccattgtggtcgtggtagtgatggtcacggttgaggtagaaccgcagaagaaacaaacttcacttaccttcctgtcgccaaacgaaaagagaaaacctgcctcgctggagcttcccagtgtgacaggtgtcactttgccttaactgacagggtcaccacaggccttcccactccctaatggtgaggatcactcgaggcccatcccaaggccacgcttgcgtggctccgaggtctggggactgttagacgcagcctgctgcagccaatcctagcgcatttggggttacaccacaagaccatctctgaggctcaaccctgacacagccctaacaagcgccgtgtgctgtggacgcagtggctgtgttcctgcaggctggggcagggcggcggctctcggcctcttcgaggaatggggcgggagctgctttgtcagcacagtcccagtgctcatctctctgccagggcccagcagggactcgtggagattttctataaatctaaagtgcattctgagcaaacctgcctcttccctcatatataattgaaagctgaaactctcagcttattctcgattgtatatcaagcttgcgtcttagtcatctctgtgaatggtatttggaccccatgacagctcagtccctgtggtcctgtcttcatagtgaatgctgatttctgttcataaaaacagaaccatcaggcagcccctgaggcaggcaagccatgaagcttgaactacggagcccctttactgcaaagagagaggagttcgcctccctcttctcacatgaacctgggtggacagtggcctggctgttctagaaagcgtcttgccgggaagcatcaaacgccttaaatagccgttccctttgacccagtcatgaatctgctaaaatactgtcttgagaaaataatcagagatgtagatgacttccgtgttgtttctaagaacgaaaattgagattcacttaaatgtccacagagggtgaatagttaaaaagttatgaaatatttgatgagatattattggagctactgaaaagttaaacattaaaaatagtgtcctaaggaagcgctcatgacaacattccttaaaaagaaaaaatgcaaaatgcagaccaagaagccagatttacagaacaatcacagccgtgcttctcatacagacacagatgtgcatacgacggagaccagcagagcccgctcctaactagagattcgcaaatggcgccacccacgactgcactgaattgggcttcttttgtgcctcttctgcagtttctacactaagcacgaagcacctttagagtcgggggaaaagaatcaaagaaacaaaccccaggagatcattgaggctggtggattcagtcctagtcagaagcccctcaccaggcccacctgctgggctcaccgctgcttacctgcgggtggcatgagggtggcggcccctgcagacagagggaagtgccccttcccatcactaggaggcttctggttaggaaaggaaagcatacacaaatcctggaattggatgcaggaagcaggagccacccaaactctgagtgagccagagctgggaggtggctggacactgtgccaggggtgccaggccgtcctctagaactgcggcccagtctgttgaaaagtcaatggaatttagtctaatgttaacaagcttggtgtccttgatgcggtctcgtgcttaaggcagacaaggtcaggcgactaagaaacccacatggtctggtcttcgctcttgctgggatggcagtggctgtacatgttggtaatttcttggtgtgataacgagaggcttttcttgaagtccttgaaaaatgcctattctcagtcatctatcctatgatgaaagaggaatggcatagataatccaaaactcattgctcttaaacttaaaaatgaatttgacttttccccaaaggatttgctttcctttcctaagcatttttaagtacacagcagctgattgcaggaggaagttccccagaggcatgtggaaggccgtgtgtgtgtctgtctgtctgtctgtctgtctgtctctatgtgtgtgtgtgtatccctgtgtctgtctgtgtgatgtgtgtgtgtatctctgtatgtgtgtatgtgtatctcgtgtgtgtgtctgtgtgtttctgtgtgtctgtgtgtgtgtgtctatttgttccggtgtgtgcaagccccaagccagcgtctcctctccctttcttcagattagcagcccctcctccgcctgccctcatctcctccatttgcacatctgagaattcccgcccgcacggaggagctggagggtgtcagccttgtggtctggccctgccagcaggtcctgctgtgtggacactgcagaggagattagtccaaggggatccatgtaggagctgccatcacacaggaggttgatcaggaaacggttgctgaatgagtaaatgattgtcttcctctgcccctgccaagtatttgaaaacaaatgctcacttggttgtcgttgaaacaacaggctctgggtgtcatgatggaaaagagcgccgtgttgtggtcggcgtcgtctgtaactcctgatagcaactgcagtcttaggagtgtctttaacattagagaccttttccaaacttcagaagaggaagcaggacgtgttttctcttgtttaaaaaaaaaattgttttcctactttttctaggtggtattcataaaggtattcttttactgatttaattcatcatctaatgacatttgtgtaacgagctgcattaggaacttcttgttattagcctgcttcacatgtaaactaaaaatagctctaaggctaggattgaacctaaaaaagaacagaagaactgcaaacccgaaactgcttcaaggtatataagaaactaaaacagttaccaggtcacaaaataatgaccagtttacactgacatgcaactagcgattagcaggatgagcatccaaggacaccgtggtaaggacagcgtctgctaacgtttttattagttcaccgtcagatttcgtacaggtccgtatgactagaaagagccgtgttctgtctgcggctcacctttgattggtgaagcaacctcctttcttcccatgttggtttacggagctcgtgtctacattagaaaccacaaaagaatattaaaaatggtctgccgtgtgcttaagaaagaaaaagatgtattgaattgtgttctgattacaaaagtcatacaacttttttcttctctcagttggaaggtttcaaaaattgattctatccagagaatcaatccctacaaggctgtaggggcatgtgaactctcagacactgttggtgggtgggtccagtactccctttgcttagggcaattaagcagtaactgtcaggattagaaaagggtatacctgcaaagccagcaatcctgctaggaggcatatattcttaaaaaccactaatatacatgtccatgaaagggttctgcccggagatgttcatgataacatgatttgtaatgggaaaaagttgaaaagaatcacttagtaggagagttaatttaaaatgatggatccatgggttagaatactatacaaccattaaaattctttaagttgtatctttctatgaggacttggttggatgtccttgatccaaaaggtaaaataatcaaattgtacaaaatgcttgcacgagctctgtgcttctgtagactggaacaagcacgggaggaggcttggccagttacacagcaggctggccacacagtgacttctagaaggtggagttggagccaggcaaggggactgttctttttttcatcatttacttctggatgatttgaattttttagaaagaacagttattagttttgcaatttaaaacagactaaaataccatttttaattataaaaagctttaagagtcgatacgctgttgggaggcatcacacgcagaacccagtttatttcacacagcccttaaagctacagtggggatttccgtttggcggctccgcagagcatggggatcttgttttgccctgagagcatctgctcctctagggtggatgcggaagctgcactgcccgtcatcagatctgcggctgtgcagctggggtttcagtgcaccattagaaactcaggcagtgaaggagcgacttgagatggccatagtccccacgcagggttccctcccagcactggggttgccctgcctgcatggcttccggtcccgcttttctcactatgcagtgaacattgagcatcctgtcatagattctcccacaaaaatgactttttctgttttgttttgtttttctcctctgagaatgacactctgtgtgacattctttatataaacctgcagcaggcagagcctgagaagtcccctcgtgccaccctcagctcagttcatccttggctcatcctcggctcatcctcagctcatccctggctcatccccagctcatcctcagttcagttcagctcatcctcatccccagctcatccccagcgcatcctcaactcatccccagctcatcctcaactcatccccagctgctcctcagctcatccccagctcagctcatccccagctcatgcccagctcatccccagctcatgcccagctcatccccagctcatcctcagctcatccccagctcatcctcagctcagctcatccccagctcatcctcagctcatcccctgctcatccttagctcatcttcagctcatccccagctcagctcagctcatcctcagctcatcctcagctcatccccagctcatcctcagctcatccccagctcagctcagctcattctcagctcatccccagctcatcctcagctcatcctcatccccagctcatcctcagctcatccccagctcatccccagctcatccccagctcatccccagctcatcctcagctcatcttcagcttatccacttcagtctgctgtgggcttcacccgcctcaggaggacagctggctccaccccagctgcagcttctaaaatgggtgcttcctgttctttcctggaaagttcagaaggaaagcaaatggataggtcgattcccctccaggaagaccagaatagaataagtcgttggttttggatggaagctgcgtgaagaacacacttggtgggtggaagtgggagacgtagcttctctgactttgtttccactcagccaccaccagctggactctggtgctcgcagtctccgaggcagcaggacagcttcctcccacagctggggcagggaccgtgcagtgccattctgctcacctttctccacacttggctgtagtgccagcgcctgtctggtaaattactgctgagtgttaaacagtcaggggtcaggtttatcagccaagtcagacaggcttgttttagagaacactgtgattattcagtgttgtttaaattaaatacgtggttattctaaccgtgcattcttagagagtttcatcctggttttgcttggctgcacgtgcagagggtcctgtgggcagttccttcggcctcaagcgtatgggaaatattgctctggtaaaagccgcagcctggttccacctccgcctgcagacagctggaaagagcaccactcccaccttggaaataagaaaagggcagaaaagctataaaattctgacttttcctgaactcatcagagagctgaggtggcaggggaagtgagttgcccagcagggaagggaagaggtgcctccaaggagagccggaccatgagcaccagttccctgcagcagagcagaaggggccagcagggagaaatgctcacctgaaattggcagtggtttgcgcaaggctaaacctggaccaatggagaatctcaaacctttgggagccacaggctgcacaggccatggacgtccactgggccctcacccagaagattgaggtgggacacgagaagagcccctcagaggtgtgggcccgcagcaggctctcctgtgctgctccccacagaacataacctgcagctcctgatgaaagacagcaaaccctgtcgcccccagagcacaggcgaagacccactgccacagaagaactgcaaaagaaaaccttccatctccagcagggcgaggacctgccacgtgtggcacactgcagggagcaggacagagtcactgagaaggttccaccctgagacccagagacacaggccctgcctcagtcagagtctgggctagagcaacagagagcccttcggacccttccaacaggctagcaggctccaggcagcaggcacagcagtcgagctgtagcaggggcacaggagcatagagagagaagccccccaaggtgcagacacacgaggaaagccaaaaaccaagggagggtggggtgggaaccctggcaaaaaccctcccgaaacccaggccctgcttgaagcatgaggtagtgtgagaggaatccgaagctggccacatgctgagtgtcaccatggcaacagtaaaacccaagcccatttcagtgcctcgctagattgactgaactctttaacagtctagtaatagaggcacacccatttccaggcatgcatatatatatatatatatacaccttagtctctgctgttctacacatgaagtctggaattcattcagaaattaggagaggctgggcatggtggctcacacctgttatcccagcactttggaaggccaagacaagaggatcacttgagcccaggagttcaagactagccttggcaacgcagcaagacctcatgtctactaaaaagaacaaaggaaaagtatgagatgcccccaaaaatataagacaaacacgcctgccatcaagagacaaagcagagaaagacccaagggcaacccagatgttggaactatcagagatggagtggaaataaccaagattaatatgacctaaaggcattgacagcaaaggtagacaacaaacatgaacagatgagggatttcagcagagagttggacactaagaaagagtcaagtgaatgccccccagaggcctatctgtgacctcaaatagccaaggaaaaaaatcagtgaatttaaagacaggtctatagaaagtacccaaaatgaagcacaaagactacaaagagtgggaaaaaaacaaacaggattgcagatcatctgagagcttcaggacagtacaaagcagtccaacatctaaccacagatccagcaaagatcccaaatcatggtatatacagacacacacatgcacgtgcacacacacatatacacacacagctggacacatatctaagccaccacaaaccaaagataaagagaaaaccttgaagacctctggagcaaaaggacacattacttacaggggaacaaggacaagaatcaccacagacttctcattagaaactgtgtaagacagagatagtccagtaatatctttaaagtgctgaaagaaactgtcaacctagaattctgtacacacaaaaatatctttcccaaaagaaggtaacaagacaaacatatcctctcttgccacttgtcttcaacactgaactggaaattatagccagggaagttaggcgagcaaaagaaataaaacatatcatattggaaagaagaataaagccatctctgttcacagatgacatgatcctgaatattgaaaatcattcaaaatccattttaatagagtatcagaacttaaaaaccaatgcagcagtattgtacccacaagctcaatatccagtaaccatttgtatcagaatcccctacactagtaatgaaaaccctaaaaatgcaatcaagaaaacactttcatttataatcatagcaaaaataataaaatgcttaagaataaacctagtaaaagaaatgtaagacttgtactgaaacattattgaatgatactaaagaagacttaaataaagggaaagaaatcacacattcataggtcagaagactaacattaagttggcagaactccccaaatagctctacagattcagcaccatccctggcagccttttttgcaaaaattgacaagctgatactaaaatttgtatggcaatataagggacccagaataacaaaagaaaaatgtaagagacaaacatactgaacaactcacgcttcctgatttcaaaacttactacatagctgcactaattaagataccatggcattggcttaagagcagacatataggtcaatggatttgaattgagagcccagaaatataccttccgtcactgctttatgcctataaactctacaatttaggcgagatagacaaattccttggaagagattactacccagcgtcatttgatagcaaagagataacctgaatagttcctgtctattaaagaaaatgaagttttcttgctttgttttgtttgagatggggtctcattctgttgcccaggctggggttcagcggtgcaataccttccatcactactttatgtccataaaactctaaaatttagatgaaatagacaaattccttggaagagattactaccaaacgtcattcagtagcaaagagataacctgaatagttcctgtctattaaaggaaatgaagttttcttgctttgttttgtttcagatggggtctcattctgttgcccaggctggggttcagcggtgcaataccttccatcactactttatgtgcataaactctaaaatttagatgaaatagacaaattccttggaagagattactaccaaacgtcattcaatagcaaagagataacctgaatagttcctgtctattaaagaaaatgaagttttcttgttttgttttgtttgagatggggtctcattctgttgcccaggctggggttcagcggtgtgatcattgatctttgcaacctcaatctcctggactcgagagaccctcccacctcttcctccccaggagctgggactacaggcatgcaccaccagacacagcgaattttgaaattgtttacagagatggggactcgctatgttgctcagactggtctcaaacttctgggctcaagcagccacctcagcctctcaaagtgctgggattatggatgtgagccactgcatctagccaagaaaatgagtttttaactaaaaactcaacacagaaaacttctgacccagaaagtttcgctggcaactgtaccaaacctttaaggaggaaataataccacttctgcacaacctgtcacagaaaattaaaaggagtgaacacttcccaactcagtatatgaaggcagcatttttctgatatcaaaaccaaagatatcacaagaataaaaaacacagattcccaagtcctcagcatcgtattaacaagctccagccaggcacagtggctcatgcctgtaatccagcactttaggaggccaaggcaaggaggatcgcttgagtccaagagttcaagaccagcctgggcagcactgcaagaccctgtctcaaaaaaaaaaaaaaaggcattatacaaaaatcagttgtatttccatatgagcaattggacattgaaatttaacatcagtaccattcaaaatagcaccaaaatacatgaaatacttaagtataaatcttttttcaaaatatgtgaaagatatgtattctgaaaaatataaaacactgatgaaagaaatgaaaaggtctaagtaaatggagaccatgctcctggtttagaagactcaataatattaagattccagttctccctaaattgatacatagatcaatgcaaccccaatcaaaaccccaataggattttttttggtaaaaatagagaagtttattctaaaatttatggggaaaaggaaactaaaataaccagaacaattttgaactagaagaacaaagttagaagcctcacactatcttatttcaagacttgctataaaaaaagtaatcaagatggtgtgggattggtgaaaggttagatgcgtagatcaatggaacagaatagagagcccagaaattggtctacacaaatatgttcaattgattttcaacaaaggtgcaaaaacaattcaattcaatggagaaaggatactcttttcaaccattggtactggagcaattaacaaccagttgtcaaaaaaaataaaaagaagaacctcgatcagtacttcacaccttatacaacaattaactcagagtgaatcatagccctaagtgtgaaacctaaaactataaaacttctagaaggaaacagaaaaaaaaatatttctgaccttgtaggttaggcaatgtcttctttaataagatgcaaaaagtacaagtcaaaaaagaaaaaaacgataagttgggcttcatcaaaattaaaaactgctttttaaagacagttaagaaaatgaaaagacaagtcacagacagagcgaaaattataaaacacgtaagattaagatcttgtggctgttatacataaccctcaaaattccatgataaaggaaataagcagcccaattaaaaaacagtggcgaaagattttacagacaccccaccaaagaagatatacaggtggcaaataaggacatggaatgatgctcattgttaaggatcttaatcacgggaaagtacggacccctgcagtgagatcccactacacacctgttagaatgtctcgaatcttaaaatctaccaagtgttggcaagggacacggagcatctgaaaccctcattcttggctactgcaactacaagatgctacagacaccttggaaaaggttgtcagtttcttacaaagttaaacgtatgcctaccatgcaacctaaccattctactcctggatattcaccaagagaagtgaaaacatgttcattcagaaacctgtatgtgaatgtttatagtgactgtattcatagtcaccaaaaactggaaacaacccaagtttccttcacctcgtaaagagagaagctgatacaaccatacaatgaaagactcatcagaacaatatttaaataaactattgataaacgcagtggcacagatgcatctcaagtgtatcatgctaaatggaagaagctgctcaaaagactgtatcctgtatgatccatgtatacaacattccagggaaggcaaaactgtgtggaactgttctatatcttccacatttatcaaaactccgcctgtacctacagagggcgaaattcactgtacgtaagttacatcttcatcaacctcatgttgcggggagaagaaactcttttccctcttgtgctgaagtcacatgaaagatgatgtaaatgccttgttgaggagtgaacgtgcatagcaagctccgagcttcattcagagcttctcccccctccacagcttggcgatttgtggtaacacaaaggctgtgtccttggacgtaatgtacacgagacactggcagaatcaaatcacctctgttgcctgtggactcacgacgcacaccactacctcttccgcctcttcctctgctgcctctgtccacggaggggactttattgttcagtggggaggggatagtttgttgctaaaccgtggggaaaataataaaaagcgtcaaggggaaaagcacatcacagaggcaaatttgccctcacttcaggtcatcaggagctaagcgggtggagagggagggagctggcagtgtgagcgtttaatgtgttagcgatcttttcccatgggtgcctctccccttttgccttcacccaagtctttctcaatcttgatagtcatgtacctgttttgaattttatcccctgcaccttgaacctttctaaattcagagggattgaagataagactcagctctaaggctcccagattccccggataagaatttatcccaaaactgccccaaactgctgctttcccgtaagtcttctggggaacctctaatctccctttattcctgagccccaggtttttctttgcaacaggaaaggagttgtgtttcattggctttcagctgaagcctctgtgggaggcttcagaatcgtaattggtttctgtctgagtggaagccaagaggtacaggagtgtcaagatcctcatcatgtaacaggatcagcggcacccacagcctccaggagctctgtttacagggaggctcagcctgcactgggcctgggcccttttttactgaaaagcctttattcagcctgaagagaaacaggtggagaggaggcgacagagccgatgatgaagagctgcggtgtcatttgctgcctccgtgctgagcggcggtcacatcctagtttcccagggtgggtgcccgcatcttccacggcatctctgccttcccctggcctctccatccaccgctctccctcctgcctcacgccgcacctccacttctgcccatgcttgtcctgtgaccctcgtggtcatagctggttgtcctgacacagacacttggggtggttccggaaccgcgtcccgttcagaaagtctcttcccagcccagcaagggctgtaaaggaaggctgtgggctctctcctagagctcagattagggaagtggcggcccctacccctacaggcagaagcccctgggccgggagagggcccttgcagtgccgtggcaacaggacaagtgtggggccccctgaaacccctcagctcctgtctccgggcgtcctgtgcccctccctgttctggcatgggccccctctcaaccttgcagtcgtctttgttgtctttggagctgaggctctgaagccgccccatttctaccccccacgtctggattctttgcctgagctcaggcccaggaccatagagtgccgggccaaggagctggaattcccatcagttcctctcccttcccactcgaaagttccttctagactcttcctctaatttattcccagagaagcccgagtctcattaaagtgcaatgtctctgttcctgcacagctttgagtctttccaccgcgggttttttcttattactgttctatgttatttaccatttgtcatttcttttctaataagctcaggattgtcgtcaagtgaaactggttgctaagaatccacagtctatcccatttgccgttgcgggattatttctaaatcagaaaatgtgcggagggagccatttgacaccttttgtggttactgtttccgggtttggatgtcttttttgctgtgttgttgctgttttatcgagtgtggttttgtgacttttaagaagaaaaagaaggaagcagagcaatcaaatgctaggaactgagccacagccacccatgagcacggggtcagacatgaggtttggggcttgcctgtttctgttttgtaatcagagctgacacaaagcattcgaggaagagacacaaagaatgctctgtaagcatttgcacatgataaccacctacaacgaccgcctaaaactccacacggagaaaccgttttctttctccgccacatttacgtgcaaggacgcaaacacggccatgcgccatagtctttattcccatttcttctatcagagaaagcgactttttaataactaatgcaggctctctttttcctttgtcgagacagagttgcttttagccaaaaggaattagggttcttaccttgtttatttcatttattttatattttgggtcttcacaagtcttagtttcttagcaaggaacagaattagccagattgactggacggcatgtatgcttaaggaaatgcatctgcgtaacccagacaagtggccatcctcccgcggaaagtcaattaaatcctagttagtatttgccaagtgtggacctctcctagacgctgaacgtgcacaccccaacccacatgtgcgtgcacacacacagacacatgcacgcactcgcacacacgcacacacacgcatgcacgcaaaggccctgaagtgaatgaagacctttgctcagggaagagagggcagcagcatgtctagcgtctgcatatttcaagtgaaaataaacttggtctttctgaagctgtctcattagggaaggcactgaagttctcacgagttagtttaaccccagccaggcttgcagctcagcaccctcctagctcttccaccatcaggagcccagtggcaccccctctgctgcccaggaaggtcccacactctctcggggcccggcctggcctctcatgaggctgtcttccttctgtctcgtaagctccctcatcttccagccagctgcctggttccctttggcattagagagagaataaaggcagtgtctcctcaagcgcacctgcctcctgattgtgttttcagtgtttgaagcggcattcggtgcccccctgccctgctgctcagtgctgacctcagtgccccccattccctggggaggcgtttcccaaggccctggtccccatcatacacctgtcagcctcacaggccactcactcaagggtctcagagcccccacactagtgaacacaggcgtggagagcgcctctcccagctccggggagggaccagcgatgtgttttgtagcagacacaggacccacaacagcccgtgcctctggtgcactggccagacgagaagcccaaagccttcagcctttgagaaagaggtgccttcatctgaaaataactacagccaaccctccatgtccacaggtgctgcatccgcagattcaaccaattttggataaaaaaacaaatgtaaataacaaaaataaatttaaaataacaatacaacaagaaacaatccaaattttaaaaatacggcatagcagctatttacacagcgttgacactgtgtcgggtatggcgggcaagctagcgagggtttgaggtgtgccggaggatgtgttctgcttgtacgcagatgccacaccctttcgtattggggactgagccgcgcaggttttgctatccgaggggtcctagaacccataccccattgataccaagagacaaccctgtttcatcgctgggcttaactgggtgttttctgttgttgaagatcccagaagagcacgacctggagagtcagatccgcaaggagcgggagtggcggttcctgcgaaacagccgtgtcaggaggcaggcccagcaagtcattcagaagggtaagggcacccgcacagccagccaggggctcattccgggggtggggcctggggcgagggtcccctgtgagcaggccccccgcggcccacgcacaaccttctccagccatccactgtcccacgacagacccgccccgcaccccacctcccttgcagataagcacatcaaggctggtggagatgaagctgctgctcctcaaggttctgcagcccagagtggggaggggaggggccgggtgggaacccagccaccgcctgggaagagggctctcccgggaccctgcctcttcctctgcaagggcagccctcagccctcgggattatcagcgcaggtggaactcatggaggcggaactttgcatgttgacatttccggaagggaaggcctctgagagcccacatctccccacccggacaggtgtcgttgcgccaggccctacacatggcgcatccttccctggaaacaggaagtgaaaatgccaggccctgctttcctcagctggcctccacttgtccctgaaatggtggccagctctgtcaccccacatctcagtcatgattttcctaaaccttctcccagatttgccactagatgccaaatcgctcccttcacctaccttgttgtttgctctcccagctgcacccggggtggaggggcagggagcagccctggagggggcggtgtctgttgccgcagacagcggagggagctccttgcggaagggatccaggctgcaggcggccccggtcacagagactgtgtggggagcagggaggccctgagagtcaacacagcaatgagggtgtcaggcagccccatcccagggaccctggcctctccccaggatccaggagagtacaggggcccaggcccagccctacagccccactgagggcacggagcagcagtggtgtctccgcactcctccccctgccctcgcggccacaggctcccaccactgagccagctctggctgggggacctcaagctgcccccaaccaaatcagcaccatcaaaagtcaaggactctgaccccagtctgcaggtttattgttttgaccttgcatctttgtcctgtaaaattctggagattattatgggttactttctgaagttgaggttgatgacccgtaggacagatgtcctccctcctgccaaagccgagggccctgcccgcaggcagcacaggcgccatgagcgcgtcctcagcgagcgtgcctaggcccggctcacacctctgctctgctgatcaccgaaaacactgctgacttctggtaccagcaacgtttctgaagcgcattcccacgcagctctctctgtgaaagactgcggttcatctcgcattaacgcagacggtggctgttgtgctgaaagctaattgtggttgtttgtagccctctgtgcatctgaagagctggcggcagaccaggtttaaagcatcgcatgttgcaatccggtgcgtgctgccccggcggccgccgctgaaccttgcagccagggtggctttctccagcagagagaacagaccctgctggatgagcgtctccaggtggcggcgacaggaggctgttttcctggaggttagcgattctctaggaccccagcctgctagctgggatggccagcacacgggggctgcctgctgcctgagacaggcttgggagctgagtctgcctcacacagttcaacatctgaagatgagctggcccctgatggccaaggtgatgctctggcctggagcctgtggtcagaattgagcagggtgcgaaacagagccggcattcgagacccaaaaccgagatttctagaccaaaaaaaagaatatatttgtaaaccagagtttgtccagacacacaaaggaggagctgctgagccgctggagacaccaccaaatgaggcctcaagacacaggggatggtgccagcaggcgtggtgccagcaggcgtagtgccgggagtcactgaggagtgaggccgcgccctcctcccagtcctctgtcctcggaattcggattcggtgcaggcgtttattttcatttaaggagccaactgtgtgctgggaaagatgtgagcattgagaaaaaggaggaattgatgcctgtagatggaagagaaccagagaagtcggcgtcgcccaggagacggggttgggaaagccctgtgtcacgcaggcccctgcccggctcttcagccttctcctgggcaacattcacgaccttggctgtcacgcactgattttcaaacgtaccaaatgcgtgggctgggtggggtttccctttgtccttcagtgcttagaattatgcccaaactccgtccagaactccctgcagctgggaatggaggcaccactagggtaacacggtgctgccgccgcaccaaagccttcgggcctgcctgcctctgtgagtgcagcctctccttgtataacgtggcattcatttcctttccgtggttctgggtgtttgctggggactgacattgttggaaacagtagctcacccgaggtgccgagcacacaccaggcatcagtgaggcttcagcccgcagactccgtggccctggtgccacctggacagtgccaggcacaagcggaggggctgtcagctgctggaggtgggcggctttggctgtgcttaagcccagttcagagcagcctgcagcagagtgcccaagtcgcgcggctttgaccttgcaccccgacggtaggctccttctgttgtaggactttttaattcagctaaaaacagggtctttgtcacatgaccatgaaaaattaggctcccagacactttgaagggtgggaagggcagggtttattgggtgagaaggaaaaaacgggaaacagggcctccccgcaaagccggagtcctgctggtgcacttcccgcctcgcagattggatcccaggttctaccccagatcgggaggctgggctcctcctgctgcaaagggcgccaacttctgtggctccccccgttgtcccagtgtgcaggctggtgggagtttctctggggacccctttatacttggctatctcacttcctgccagagcacaagcccaccactccccacagggaagactggaggcgggcaacggtcctctgagccagaccagaagttcaggtgaggacacggttagtaagagccagtcaggtgaggacacggttagtaagagccagtcaggtgaggacacggttagtaagagccagtcaggtgaggacacggttagtaagagccaggcggtgtctctctgcaccacctggagctatgtctctggctgaggaaggcttgggggtccccaagacaccctcctggttgcccagaggccacacaggtgaccgcagccaaggccaggaggcagcccagcttgtgtccttggtgccacaacagacaatgaggcttatgcacccacagatccccagctgccctttcagtcaccaggatgtgttggaatccatcttgcgccctctgcatttttagcttccttttatggttccttctagaaaaaagccttttagagtcacaagggacttacttcctagtgctcgtgtttgggggcctggtggttaagtccacgttcccctcttctgttaaatctgtgattctgtaatagatccctcagtcaaggaagttcatagttaccattctagactgaaagacccccggactttggctgcaatgtggatcctggcgaccacacccatgtctcctccttaagtctgttacgaatcagagccctaccgagcttattctgaaactttagcactttcttcatataatctgacccagataaatttgtacaaacctgaccactgctgacaagtattggctgaatgcttccacatgtccagctcggcatcaggagctttgggggttttgagcaaaggcattaaccctgcggccagggcccctgggccctcattctgggtactcagtggctgccgtcaccccaagagcccagatgtgcctgctcctcagcaggtggtcaggcccctcccttcagtccctgcttttcttctgcttcctttgtgcctctccaagtccccaaggtattgacgtcggccatgataagatacgtcgtgaatatttattgtaaattaagactggcttgccgggcatggtggctcacttctgtaatcccagcactttgagaagccaaggtggatggatcacttgaggtcaggagtttgagaccagcctggccaacatggtgaaaccccgtctctactaaaaatacaaaaattagctgggcgtggtggcggatgcctgtaatcccagcgactcaggaggctgaggcaggagaatcgcttgaacccaggaggcagaggtggcagtgagccaagatcacaccactgcacttcagcctgggtgacagagcaagactccatctcaaaaaaaaaaaaaaaaaagactggctactggctgggcgtatgcccataatcccaacacttgaggaggccgaggcgggaggatcgctcgagcccaggaatttgagactaccccgggcaacacagtaagaccctgtctcaacaaaaaacaaaaaaaagtagccaggtgtggcggtgcgcgcctatgtccccagctacatgcagagttgaggcgggaggatcacttgagcaggaggtggaagctgcagtgagccatgatcacaccactctgcaccccagccagggcgacagaacaggacactgtctttaaaaaataaaaaaggggcccggcgcggtggctcacgcctgtaatcccagcactttgggaggccgaggcgggcagatcacaaggtcaggagatcaagaccatcctgtctaacacggtgaaaccccatctctactaaaaatacaaaaaattagctgggcatggtggcgggcacctgtagtcccagctactcaggaggctgaggcaggagaatggtgtgaacctgggaggcggagcttgcagtgagccaagattgcaccactgcactccagcctgggcgacagagcgagactccgtctcaaaaaaaataaataaataaataagggggaaaagatgctggctcctggatccactcttgtgtgtttcttttgacaggcattacgagattggacgaccaaatatttctgaacaggaaccccggcgtcccctctgtggtgaaattccaccccttcacgccgtgcatcgccgtagccgacaaggacagcatctggtatgcaccgcgctggtcaggcctcccttccggctgaccgacagccccagcgatgccctgttctcccccgatcaccactcctcttccttgaaaagcagatacaaggcactcaccccgaggcccttagcactgtttcctgagaaacggccctactcaccttctcctctttgaccgagccccacccacacctgccccgggcctggccctgtccttgtcactgaaggacagtccagagtcctgcctgcaggtcagaggggagtggcagggactccccagtgacacttgtaatagaggcgtacacaggggggccagcttgctgccctgcccgcagaagcaagcatgtgatagacaagcagtaagaagatgctaggtgccccaggagagaagtgagtttaactcacagcaaatatcgcccttagagatggagagagtacccacttcatgggggagggcagtgggagggggttccttttagagtttagagtttataaaatctctgtggttcacacctccatttctttttcctctttttaaaaattgtggtaaaacatacatagcctaaaatttgccattttaaccgttctgagtgcgcagccagtggcattcagcgtattcacattgttatgcaaccatcacccccattggtctccagaaccttctcatcacacaaaaccaaaacttggtccccatcagacaccagctccccattcctgcatccgcctgagccagtgtttcactttctgtctctctgaagtggcgcacgctaggagcctcataccagtggagtcacccgggatttggccctttgtgcctggcttattcggctcagcgcagtgtctttaaggttcctccaagctacagcacgtcagaatttccttttcatggctgagtaatattccactgtgtggatggaccacactttgtcttatcattcatctgttcatggacacctgggttgcctccaccttttgtctattgtgaataacactgctgtgaacattggtgtacaagtatctgttcaagttcctgctttctgttttttggggatacgcccagagtggaattgctggaccatatggtgatgctctgtttaattttcggaggaaccaccaggctgttttctgcaggaaatcctcttcccttcccacccgcacagcctgtggctccaatttcccacatccttgccagcactattattctctctttgtttgtttgtttggagacaaggtctcactttgttgtccaggctggtcttgaactcccaggctccaacagtcctcctgcttcagcctcccaagtagctaggatgacaggtgtgagccgccgtgcccggctgtggtgtgtggttttttgatagcagcccggtgggtttcaggaggtatctcactgtcatttgggtttgcagtttcctaatgacttttttattcctctcttcttcccttaagcttttgggactgggagaaaggggagaagctggattatttccacaatgggaaccctcggtacacgagggtcactgccatggagtatctgaacggccaggactgctcgcttctgctgacggccacaggtgagcggggtttgcacagccaggattggaagccagggtctggaggagtggcggggagggtgtgtgatcctgagatgtgtttgtacatctgtcttacagaaagccctgctcacacgcgagggccactgtcattcagaagtggggaggtttatgagggaaagggcttcagcagcagagacaggaaagcaaagatgaccccatccttgagggttccagggacttgtcttctcatctcagtcctctagcccttccagcaccaggaaaagcctctgacagcctctgtccttaaacccctgtgagagacccggtgggtcccacgtgacacccgagaatcagggaaggatgccccaagccacaacacgtgccaggtcctccccggccagggtctcctggcatcgctggctcatttgccagttgctgtccccactgggagctggcactcaccctcctccagtcccgtcctgcacctgaaaggacatcgttgaccatcatggtcgctgaccagtggttcattgccgtagtgggtctcactcaggttttggttttcttgggttttcggggggttttttggaggggtccgaaatgtcttagtttcatcttcactttggaacaatcgtttgtttccatgtcagttaccccacgttgacagtcattttcctttagcgctttgaaaacacgtgtccattgcctgttgctgatgagaagtcgctgtcagtcccactgcacttcctgtggagactagagagcgctgggcgggaggcaggcgggggaggccagcacggctgagagaagtgaaggccgacacccggatcccacccagcctgtccctgtcggccgcagcccctggacacctgagcctctgagagtgtcgagtcggttgtgctgacaagtgcgcagccctctcaacgcggttgcgggctcctggtgaggggcgtggccatggggacgtgtcctcgtgcagcccctcctccgagcgctgccccctcaggaccaagtagcatcaaccgatgtcgaaagcccgtctttgtccctgtagctgtcagacgtgaccgggaggagatgcatagtcggggcaggggccggtgggggcaagggaccagccaggctcagccagcggtttcggagagaccagatgtgagcatctcccaacaccagagggagagggcagttccttggctgagagagcgagcactggagcagggccagggtcctttgcagaacgggctccagacagcagtagaagggctccagctccaaaaccaggaacgtttggtgtatgcgatggaaagcagagagcgggacaggcaggtgggtggaggtgaggccgtcgtccaccagggcaatcagctggggcttgaagagcgcctgagggtcacgcaggaggggctggtgaggccagggggtgcggatgtggttcccggaaggctcagagtgcccgcatgctttccccacacccaggccgacctccctgcctgtctgctggaggatgcagagggccgtttcctccattctaagccctgaagagcagggcagtgcgtccctgcccacgtcttaggcggagagcccagacgtctgcattgtcccttcaagtcaaggctactctctctgtggagcacagagaggaatggggcggagggtgctggtgtcctctgtgaagctggcctttcgttctgctccctggcacaggctggctcaccagagggtaaaacgcagccccacccacccaaccgagcttcacccgcctgcctccctccagggaacccgatgccctggagctggagggaggaagggcagccccggctcccagggcagccaaacctcagagttgagctctgtggccagggtgggacaggattgtggtctcccatcccctgggctgcgactcctcctgctggctcgcccagatatggatctgaggacagagtccagtcggtgggcacccagagatctggaaccacgggtagtgagtcaggctggccgcccagggtcactgcagcacgtctgccaggaagggctcttaccaccacgcacagagcacaggccaggccatcgaggggcctggttcacatcctttcctctctccctccccagacgatggtgccatcagggtctggaagaattttgctgatttggaaaagaacccagagatggtgaccgcgtggcaggggctctcggacatgctgccaacgacgcgaggtgggtccgcccggctcctccccagagcagaatgtgttcccggggctgcggacgcactcggaattccaaggcccttctggggctgtctctaaacaggctgctccacctcagagtccccagaatcctaaagcaacagctccccgccaatgtccccgaaagcgtgagagccccaggtccctgagtgcactgcctggctggagtcccagccctgggcatggtctcagccactcgtgggtgcccctgtccccaaccttcatccttggcttgcagacatgtgctgcttgggacagcatcactgctggcagggcctaaagggcccgcatcacggggtccttctttggacctaaaattaggtctgctctttggacctaaatttaactcctccttgggggtcggggtgcacatggccatctggggcctcacgcgctcgctggcatgcctgggctggtgggacggagtggctgcagtgccggctctgggtacagttctgcgtgttgcctgcaccgctgcacggcctgggtgcggggcgaggcgcaggcccacaggtccttctggaaggactcaggcaggagttaggaggctcccggggtcaggcttctgggtctagatttccagaggcccctctgcagcaccaggcattcgcctctaggagtcatcgctcttcagcggatcctgcagcccttggcgatgctcagagtgaacgcgttaccccgccagcccccctctgccggctcctgccggtttgtgatttctgtgtcttcgtctgtggcctgtggatgtggccttacacctcgtggtcagccttccgtgtggggcctgccctggttctgccctaggttgcatggctctgtctccgcccttctgtctgagcacctgtcccgggagatgccaaccctcacgtgcctcgggacgtcatgggggcagctccagggtggacattgcctcgaacgttggatttttttttttaatgtagccatgttcttaagtttcatccagcaaaaaaaatcatccacaccccgcactccgtgggggccctttcctgttgcttctgtcctgatctctgggctctgcttcccctgcgaggcaaccctcttctggggtatgacagcttccctgggacagggcaggaaaagtgagccccagcccggggccctggtccaggaggggtcccgggagacagctggatggccagcctgggggtcaggccactcaccggccattgtgtgtctctccaaaagaccaattttggtgacactgtgtcatttgctagagaggaaagatcactgtttgataggctttccaggctgtttttctggggtcgctcagaggcagtggtgccatggaaggagctgggcttcagcacgggagcgcctggctgagccctggctctgccttgccctttctcttgtttgcttttgtgaaaacttccctccctgtccaaggctcggacctgccggaaatgcagtgctggaaggacacacccgtggctagccccggggtccatgagacccccctagaagcatccacatgtccatgcccagctggccccggggtccctgagaccccccggaagcatccacacgtccacacccggctggccccagggtccctgagaccccccagaagcatccacacgtccacacccggctgggcctggggtccctgacacccccagaagcatccacacatccacaccgggccacgctgcaggaaacaagacttggtggcctgtgctgccccacgggctctcagtctctccgggtcaggatggcagtgcccagcttacatatcaggaagcagcactgacgagaaaagcggccttctcggcccagaccctccagtgcttccttcagagtgggagcctgtgctgcacttcaggggtctcggggtcagagaacgaggctctcactgcgggggaaggcagcagaggcgtctcgccagacgtaagagctccaggccccagtccccgaaggctgtgccagctgtgggctggggcaccaggcacagctctgggctccctcaggttgcacaggacatgggaaacctgggtgtgggcagcaggcgggtgtgtcactgctgctgcggctttgctatgtgtccaggactggttcaaaccagttcactcggcatcacagaatctgaactgaaaaaggacttagggttcacctgactatacccctccatggcaggacgctcgggccgagggacagctgcccagagcctctggttcagatggacacctgaggcccagggtcgggctgtgccatgtcccccatgccggcatgtcactgtcctacccgggtacgtcggcctatgtgctggagacagggcctttacagaggtgattaaggtcaaaccaagtcaccagggtggccctaacccaatgtgcctcgtgtccttacaagaagaggccaccaggacacagacacacgtgcagggacaggtgggcgttcctgggacgccggctcggcactcacccaatgaggtcacggtgtcaagggagggcccgagttccagcaggttgctgggggatgtctcacgggcctgagggtaattatttgtcatcgattggagtcacactgcctaaatccagagccgtgaatgctgaccacagcacagccaccactcttcttgaaagtcacagtcaccaggacccagtgttggcatttgatagattaatggtattagcaggttggtttccctccgcggtattacatttaagggaataaacaactcacatgaacggccaagggctgaagacagaagtggtgctctccatcttcgtcaggtgctcacggagggcccacagcacatctgatctggtcaccacggggatccgtggagccgcagaggtttcatcctcccctggaactgaggagctcaggccctccgccagcttctgctgcagggagcctgcaggaggcccaaggcgtgacctccgcttgccccagcccccactcgcctctcccggacccgcttgcccagttgggcacacccagctcaggcacacgcaagccaggctccccacgtcacccctgagactggtgctttggaggctgtttcttgttttctggcatcttgaatgttctccatgtgctcgttctcaccttttccctctgtttgttctgctcgtgtcactgctgttcccagggcacctctctgttcttcccgacccaaggtgtcgcttcctggcagagtcaccaggaggatcgtgcctgggacgtggctgctgccccccaagtgaccatgcagtctagaagtgcagagcccagacccatgcatctctcccttctctttttcttttcttctttttttttttttttttttttttttttgaggtggagtctcgctctgttgcccaggctggagtgcagtggcgtgatcttggctcactgcaacctccgcctcccaggttcaagcgattctcctgcctcagcctcccaagtagctgggactagagggtcgcaccaccacgcctggctaatttttgtatttttagtagagatggggtttcaccatgttggccaggatggtctcgatctcctgacctcaggtgatcctcccaccttggcctcccacagtgctgggattacaggtgtgagccactgcacccagcctgtgcattttccaagttgtgcagccaccacctttatctagttccagaagattctcaccactccagaaggcggcctgctgcccattaaagcagtttcttcccatagattcttatttatctatttttgagacaggttcttgctgtcacccaggctggaatgcagtggcaccatcacggctcactgcagcctcgacctctcagggctcaggcagtcctcctacctcagcctcctgagtagctgggaccacaggcccatgccccacacccagctcccataagttcctcacttaaacagagagaaacttagaaaatgtctgtgccaagccaagccctctgtgcttgtggatctgccccaggtctcagagtggggcctcagggcctcctggcgcagcctccggatggccgtgcctccaggcaggacagcactgagccactaaaagggatgcaccaggaaccctgggcggtgtcctcctcggtcacccagacgccacttcccaagagcatgtccgggtgggcagcaagcattctttgtgattaatgtaggtaacagcatatcctgagggagggggctccagttctgtgtcctcaggctctgttggctgcacagctgcagcaggagctgggctcttctgggcagaaacggggaagtatgtgccctcccgcccggttgcacaccggccctcactgtgctcacaaggcctcccagcggaggagcagggctgcaagttgaaagcctgtgatccaccacggcgctcgtgcttctgacctgctgggacatttcttcctgcctgggttcaggtgtatcacagtagagggactacacttctttttttgtttgtttgtgtttgtttttgagatggggtcttgctctcactgcagcctcaaccacctgggctcaagcggtcatcccacctcagcctcccaactagctggaccacaggcgcacaccactgcaacggctaatcttttttcttttgagacggagtttcactcttgttgcccaggctggcgtacaatggcggatcttggctcactgcaacctccacctctcaggttcaagcaattctcctgcctcagcctcccaagtagttgggattacaggcacccactgccacacccagctattttgtgtatttttagtagagacggtgtttcactatgttggccaggctggtctcgaactcctgacctcaggtgatccacccgcctcagcctcccaaagtgctgggattacaggcgtgagccactgtgcccgggctacattggctaatcttttattatttgtaaagacaaggtcttgctatgttgcccaggctggtcttgaactcctgggcttaagcaatcctctgtctcggcctcccaaagtgctgggatcacaggtgtaaacacatctggcctgggactgcatttcaaaagtaaaataaagaatgtatgtatgccagcaattaacaactagaaaatgtaattataaaacatcatgggccaggcgtggtggctcacgcctgtaatcccagaagccgaggcagatggatcacctgaggtcaatagttcaagaccagcctgaccaacatggtgaaaccccatctctactaaaaatacaaaaattagctggacatggtggcaggtgcctgtaatcccagttactcaggaggctgaggcaggagaatcacttgaacctgggaggcggaggttgcagtgagccaagatcacaccactgcactccagcctgggcaaaagtgtgagactacatctcaaaaaaaaagaaagaaagaaagaaagaaatcatagacaacgggaataaaaactgcaagatacctaggaatgaatccaacaaatgcactttcttcacagatcaaagcataaactctaattgaagactataaaaggcacatgcagtgttcatggcaccatagccatggatgaaaagactcatcattgtggagattggcagttctcaaattaatctgtggatttattaatacacttttgattatattcccaggagagatttttataaaatgcagaccagccaaggcaatattgaagaggcgcagacggcattaagaagctgcaattgcagggcagccaggccaagaggcaccagggccctcagcgcagcagtgagcccagaagggccgcaagtggcagggtacctctgcgcactagggaaggagccatgttgctaaatggtgttgggacagctgatgccatatagaaaaggatgcagtgatacccctacctcacaccatgcacaaaacacatcacagtgagagacctaacctgtaaaagcctttcagagaaaaatcaagaggaaatcttcctaacagtgaggaacaaaaagacagattgaacaagagattgagggtaaagacatcaataggtttgactctacagacttcttcatgaccacaagaaaaatgtcacggttgtaatgtaagtggcagaataagaaaagatatttgcagtatctacgagttacagaatatatataaaaatatgtgcaactgtctgtcgtgaaaaaaaacggcaaacaccacacatcgataaggatttggggacattggcttgtgtgtgtcctgccgagagtgtagatggtcacccatttggggaatgaaatggccttccctggggagatcagagtcatgcaggatacatgactggcagttccgttctaggcgcttccttctccacccgcaaggacacgtgaagttgttgactgtgacatggttcacaaagccaggggcagctcaaatgacggggttagttgtacagtggaaggtaacgcaagattaaatgagttaaccagagctgtgtgtcttgggccagataaatcctcaaagcctaacattaaagaagcaagttgctagaaaataggccccattttgacactgaagaggttttttgaaatgtggaaggcatgttacgttgttgatgagcgtgcgtaagcaggaaaacctcagcagcccctgggaggcgccctcagcccaagggacagccctcccaggcaggcgcaggggcagacgatgcttttactgtgtctaaaattatgcttctctatgaaaaaaaaaaaaaagagcaaacaatggtaaaatgttagcaaagttagagctgagtggtgggtacaaggattactatggtgttcctttctgtatcttaaaatggttatcattacagttttagaactgaatctggttttaaatacaggccgtcacgtgaggtgggggttgctctgctctgtctaatccccacacaaagggcagcccttgccccattctctccgtccatcccttgctgacgccagccgtcgggagtcagccccttgctgtctgaaggctgccggcccgtggcccatgccgagctcctgtttgtctcagaagaaccggcttcctcaagctttgatagggccaaaaggaggaccctcatcttcaagccttaacagccttcctaaagtcacccagacctgccagttctgcccaggcgtccagacggcaggcatcttagacgtcgctgcaagggtctgctccagatggtgagcaccttagacagacgttgctggaaggcactgctctgaacggtgggcacctaacagacgttccgggaaggcactgctccggatgttgggcatcttagatgttcctggaaggcactgctctggacagtggacaccttagacagatgttcctggaaggctctgctccgatgttcctggaaggctctgctccgaacagtgggcaccttagacagacgttcctggaaggctctgctccgaacagtggacaccttagacagatgttcctggaaggctctgctccctctagcgatgcctggggcatagtcgagtcaggggaagactcagagttccagctcagaattgtcgccccagcctggacttgggagttccagctcagaattgtcaccccggcctggacttgggagttccagcttagaactgtcaccccggcctggacttgggagttccagcttagaattgtcaccccggcctggacttgggagttccagcttagaactgtcaccccggcctggacttgggagttccagcttagaattgtcaccccggcctggacttgggagttccagcttagaactgtcaccccggcctggacttgggagttccagcttagaattgtcaccccggcctggacttgggagttccagcttagaactgtcaccccagcctggacttgggagttccagctcagaattgtcatcccggcccggacttgggagttccagctcagaattgtcaccccagcctggacgtggggcacaccagggtccctagcgggagctcatatgaggcatatggacccaccagatgggctcgatggtggcaggggtaccttgtagctgctggccaaattgctgcccagagcaggccccaaagcctgcccaaggcaagggcccatggggtgatgccatgtcccactgtatctctccaggagctgggatggtggtggactgggagcaggagaccggcctcctcatgagctcaggagacgtgcggatcgtccggatctgggacacagaccgtgagatgaaggtgcaggtaaccatgcaggtgtcccccaagccctgggcctgtggggcagtgtgtgcagggctggtcctcgtcacagaacccagcaaagtgtgcggtgaggcctggccatcccaggggtggagtcagggcctgggaggacagtgccgggacaatgctgggaggagacgtgggctccctgaggcctctggatgaaggtgaactgcaacacccagccctgcgctgcagtatggctcaggctgcgccagctctgagtgtttgcaagtagtgtcttctctctgcaaattaaggaatgtcagaaatcagtagggtgaccaattgtaaattagaatgattaattatttggaggcgtttttttttttcttttgagatggggtctcactctgtcaccctgcgtcacccaggctggagtgcagtcgtgcaatcacagctcactgcagcctcaacctcctggtccaagtgatcctcccacctcaccccccccccccaccaccaagtagctgggactacaggcatgcacccacacgcctggctaatttttttaactttttgtagaaacaggggtctcagtatttgcccaagctggtctcgaattcctggctccggcaatcttcctgccttggcctcccaaagcactgggattataggtgtgagccgctacagaagacagaagatttttgtttctttttttttttttttttttttttgagacagagtcttgccttgtcgcccaggctggagtgcagtggcgcgatctcggctcactgcaagctccgcctcctgggttcatgccattcttctgcctcagcctcccgagtagctgggactacaagcgcccaccaccacgcccagctaattttttttttgtatttttagtggagacggcgtttcacgtgttagccagaatggtctctatctcctgacctcgtgatccgcccacctcagcctcccaaagtgctgggattacaggcgtgagccactgcgcccggccagaagcctctttgcttcttaaagcatctgctattttcagttttgacaaaaagcggagtacattggttttgcccaagacagcctggaaaagtggtagagacctaagcaggccgcgctcagcagaaatctaactgcattgacttcatttggagcagaggcgagaccacagatactgtgaggggcagcgcctgaggtggctttagagccagtattcccttcctctgggtccccagggagaggtgtggcacagaggccatacccagcctctctcccgggcaggccatctggtgtcaggagggatggctcagccctgctgccgtagagggcggtgtggagcaggcccagcagaggggaggcctgggcaccctcagctgctcgaagctgctgtggttgctctgggcagcagcagcccgagaacctggcccaggccttcccgtgtgggcagcctcccctctgacgtgaccgtggatccctcgaggcaccagcagctttcatggcaccttctttggggtgggggggtcttgcacctgtctggagctgtggctccacacgagacgtagccctcagggcacagcgtggacaccctgatcctcagggtctggtcaccagtgggggcttagaggcccaggtggcctgcggggcaggtgctgttcctgcagaggtgggtggaggcacagagcgcagcaggtgctcccagagccggctctgcccctcgcaggggtctggccccatcatccccacgcctgtgtttcctcctggagtgcacaacccagcaccgcccatcgtgcgtggaaagcgctctccctctcgtggcccttttcctcctgcgtccctggcaggtgccatcgcccccgcccccgcttctccagcacttagagcccccgagggagccagatgacccctcctggactcatcccatagctcattagaagttctgagacgcagccagtgaggagtccttgccaaaatgtgctttgctttcctttttaggaaacagagagaggttggaagtttaattggcactgacagccagtccttcccagaggcgtttgcaggcctccgctcggggtggggctggcctctgcctcactggctgggtcccaggcgcctcagggcctcagggctgtccctccagggccaagggataagggcgtgactcattgtcctgccagcccctgcctctccctgggactcctgggctccccaggcctttgatgcttccctggatagagagaaaggcccctgcagccagggagggtgatccccacagccaggcaggcagcaagaggggtcctggcgctgcaggacagcagggagggtggctcggtgccccggtcttcaccgggctgcctgtgtttggctctaggacatccctacgggcgcagacagctgtgtgacgagtctgtcctgtgattcccaccgctcactcatcgtggctggcctcggtgacggctccatccgcgtctacgacagaaggatggcactcagcgaatggtaccttgaccctgtcctctccctccccgagtgctggcagggtaccttccaggtggtagggccgtgtcactgccatttggttgggtccaggtttctcagtgagatgcaaagcttccccaggagcctgcagtggcgtatttaggccagtcctgggctccccaaagccgccaggcccgtcccactgaggcccatcccacaaaggtctgccccacagaggtccaccccacagcctatggaggagcacaggggacaggccatgtgggatgagccagtggactggaggcagaggctgtcggggtgaggcagggccgcagccaggcacctgccacctctgagctcacctgaacagaatactgccactgcctgccacctcctgggtcatgcagcaagtgtctggggagggatgtctgagggcacacacgtgggcacagcagccctgggcactgcctccactgagcacccctgtgggcaggtgctgtccgcgtctggcagaggacagggtacacgcatgggcacagcagccctgggcactgcctccactgagcacccctgtgggcaggtgctgtccatgtctggcaggggacagggcacacgcgtgggcacagcagccccgggcactgcctctgctgagcacccccgtgggcaggtgctgtccgggcctagcaggggacagtccgtcttggcccacacggctcatgcagcagaagtaaatttcacccagcacagagcgaggattcccagaaggtccttgtgcctccagcttcatcagctttaggtctgggattctcattcctgaccctccagtctgcacagatcggggagacacaatgaggagttttgagggaagcaaagcaaagggtgggcagggcctgggagcgctgcgatggccgcctggcccccgtctctgggcagcttccatgtggctcagacagtcctccagcggcctgacggtgacctagggcccagccctgagccagcctggggaggacacagggggtctctgctggagcaggtcacctggagggggctctgaccctgcgtgagcactagcccctcgtggggagcggacgggcgagggcctgcggacccgctggcacaggcagacctgggcagctcccggtgagagccccgaagggtggggacgtccttcagggaagccccacgctgagcgtgccccctcccctacagccgcgtcatgacgtaccgggagcacacagcctgggtggtgaaggcctccctgcagaagcgtcccgacggccacatcgtgagtgtgaggtgaggagcgccgatatttagcagccgttctgctgtaaaaacattattttcccctccatttaaaatacgtccttggtatttaaacagctggaaggggatggcatttcgggcagtaattaactcctgccctggaactggccagaaagatcaggcgcagcccgtaggggcccaggggccacagctgctcccctgctgggggacacctgacctgcaggcgctttgggaactttcctgggctgccaactgcggagggttccggggggagttgggcagctgctctccctccacgggcaggggtggcagggtggcaggggcggcgcgtctgccaggcacgtggcagttgtctgcacataaattcagttctgcctcttggtaaatacagcaccaagagcagggaatatttatttgcctattaaaggaagagcaagatgtaatttatgaatgcaaagccagcatttcttcaaagagatgctcttttcccccttgtttgtgatataaaaaccaaacataactcttgggatggacgcctgctgggggtggaaggcaggagccacggggcctcaaaagggccaggccatccctctctcgggccacagcctgccatccaggctctgtctcccgggactgcaggccccggttgcatgaaatctaatctctagctggaaatgaaaccaggagctcacagcctcctcccgcatctgtgctcatggtcatttctctaggccagaaagctccgcgccttttctggctctgagagagcttgtgggggacagccttggccctgagaccagtatgggtgcatgtctgggccccacctgggcagccctcactggggacgctgagcatccaggcagctttttccttgagcagtgtgtgtgcaaacaggtgtgcgaccccacacacctggttccaccgtccccctggccaggcccctcatggggcctccgggaggaggtgtcactgtgaccctctcttggcagcgtcaatggagatgtgcgcatctttgatccccggatgcctgagtcggtaaatgtgcttcagatcgtgaaggggctgacggccctggacatccacccccaggcggacctgatcgcatggtaggcgccacccacctccctggcctgcaccgctcacccgcctcgggcctctgtgcaaacgggaggctcttgtgttcctgcccccaggagctgaaggagggcaggggaggatttcactgctgtggggacataaaaacaaaagatgtctgcccaccacatcctcccaggataaactctcagggccctgccaggcccgagtcctcagtgagagtgaccagagggtcacacctgccccgagccagcctgtccccgtggtctagccggcctgtccccgcggtctcggcatctgcgcccatcttccatcctcaaagaagagggcagtgatgccgggaccctttctctccccacagtggctccgtcaatcagttcaccgccatctacaacagcagcggagagctcatcaacaacatcaagtactacgacggcttcatgggccagcgggtcggcgccatcagctgcctggccttccacccgcactgggtcagtgtggcggtgggtgggggtcgggggtcgggggctggggtagagggatgggaggcaaggggacaaggcagcaggggtcctgcctggctaccccacaccacagtggggcccattggctgcctgagggagggacttgcctgggtcccaggatctctagggcccctgccccaccctgcactcgccccggaagcagagccccagtcccgtcactccgggaggaattgacacacagtggctggggcaaagctcctgccctcagaccctgcactaaagccatccctggggacctccaggagagtcgctcggggtgtccatccctgtgcggccctcaccccgtcccctgtgcggccctcaccccgtcccctctgcggccctcaccccgtcccctctgcggccctcaccccgtcccctgtgcggccctcaccccgtcccctgtgcggccctcaccccgtcccctctgcggccctcaccccgtcccctctgcggccctcaccccgtcccctgtgcggccctcaccccgtcccctgtgcggccctcaccccgtcccctctgcggccctcaccccgtcccctctgcgtccctcaccccgtcccctctgcgtccctcaccccgtcccctgtgcggccctcaccccgtcccctgtgcggccctcaccccgtcccctctgcggccctcaccccgtcccctctgcggccctcaccccgtcccctctgcggccctcaccccgtcccctctgcggccctcaccccgtccgctgtgcggccgagtcctcaccctgtcccctgtgcggccgggccccacctgcacggctctctggccttggttgcagcctccccacgtggcttcaggccgttgtttttagattaggattctgcccacctgccgccttgtgttgtgaggctccaggcatgtagctctgctgacacgtgtgacattggatcccagagctgccccgtggggcagtcctgaaaaaaccacgcagggcccggggcagcgccacgcccctcacggagtgcaccatgcatgggccctgcagaggactggtgggaccggcccggcatttccgggcctgaggtgggcgtgggggttcctgagaccccggcaggagctgcctaaggatgcgggttggcctgcgcccccccgccccccgcagtgtctgcccgcacctgaacccctgctcaccccttctctctccttgcagcctcacctggccgtgggaagcaacgactactacatctccgtgtactcggtggagaagcgtgtcagatagcggcgtgacccgggcccaccaggccacggccgcctgctgtacatagtgaagctgtcactcgccggggcacggggcgtcggctgctgcggccccgcagtgtgaacgttggctgctgccttagctgctgatgacggcaggagggccctgctactcgcttttgtctgtcttcgctgtcgtgtctggaatgtcagggaaggggagggctcgggttgacggtggcttcccactgagcaccagcatccaggtgcacccccgcggccacggcgcctctgtccctctcctgttctgtgtttctctgagacgctgaaaggggaaacacctcactttatttccatgtaatcagagcattagctgcagaaaaaccccccgacagagccctggcggagaggcaggcgctggggctcctacgggtccctggggcagctgtccccatcaggccaagagcgagcgagaggcgctgccccagccaggcccaccacctctcacagtcagtgcacgcaagcagggacatttcctagccagctgggggacactggaaattcgggaaaccaagagagaggaagaaggagacgcccctccaactggcgggtgtgaaggaagccgcccaggggtccgggctgtccttggccgctggcagcatcactgagcaggaagcgcacagcccaccctccccgcacctccaggtctctggactccagttttggcccctctcacacagagctgtcagcaggggccgctgtggcggtgcacaggggaggcaggtccttggcgaggtagcccctgccttaatccacggggctcctttccctccgaagggctgctcttccccacaggcgcggggacagcagcccgacctgtggtctccatgcctgtgccctcacacaggtgtagcacacgcatgtgcagatggcaccacggccggcacctgggggcacacacatgcaggcggcgtggtctccctgctctgtccccacacgttcctcacatacaggcaagaggcactgccgggtcccggacggctccgggtgacaccagccccgtctccagccttgagccgcccatgctgatgcgacctcggctgacagctgggcctgtggtgcagacaggagctgtgtggacagtcccgcccaggaggggccgcagggcgtgtatgagcagttttgcaaacagaacacaaccacaatgatggtattttgaaaagtgttctttccgtgttcgtcgggaatcaggattattgagaggtgaaggagccaggtggcttcattctggcggtgagaggcccacgaccacgggagtgagagctggtgtggcgaggcccggctctcctgcggtgtggctggtggcctgccgtggccaagagcatcttctgggtggatggaaccctgcctggtcacatttggccagagacacacctggccctcagggggctgagctggagactgagctggggctggccgggacgtgacaaggcaggacagaggcggcccctccgctgctcctttttggaatgcgagctcccaccagaagaaggttccggcacgaatcccatccccacgtctgggccgagaaagcagcccgggtccggaaggtgtagagagtcccggcctcactcagctcacagggcgtgccaggcggcaacaccagaatcttccagaagcccagctccacccgcacacgcagcttcccatccagtccttcaactcaattcttacccaacacgcgtttctgtttgttttgagacaaaatcaccacctgtcaaaaggcaggtggctccagaggggtcaagacccccccccgcccccgctccaccctggagcccacccccatgggcaccgcgtgccgcctgcacgtgggctgtcttcacaggtctgatgtgaaaattcaatcacgacgttaaccggctcgagagagcgccggcctagaggctcattatctatttattttaccaaacgcgaattgagacggactttgacaaaacacgaaatggtaatgtgaagctaagagcagagagtgaccaacagtaaacaacacgcgcagactccgcggctggcggctgtgtctttaaggaaactgcccaccccacctcaggggggcatcggtcagagcagagctctggggggtggggggacgttgcccgggtcccccctgctgtccccagggccaccagcagctctgcgtcccgggtgctctccaggcaggcactgtggccacagggggcctggcacgtcgagtgtgcaaaggtctcggtccttttctcccaggcagtgcccccagccctgtggcgcagaccccacatcagggagcgtactgtgtggcaagagccatcttgtgacgtaggccagacacgtgtctttctctttaaaatgacggttatcctctcacggttagaggccccattcaagtctgcattgaaatctgggccacgtcagagttcctgggggagaagccgcttccccgctcctccccacttctggaggcccccactctccttggctcgtggccccttcctccagttcagggcctctgacccacgcccaccgtcaccacttctcatgcaggccagaagtgtttccaggcctaggggccgtacccacctcgggctgtgtgggtccttagccctaatcacatctgcacatccctctggccaactctttttgggtttgctttttgttttgagatggaatcgcacgctgtcacccaggctggagtgcagtggcacgatcttggctcacctcaacctccacctcctgggttcaagcgattctcctgtctcagcctctcaagtaactgggattacaggtctgtaccaccacacccagctaatttttatatttttggtggagacggggtttcgccatgttggccaggctggtttcgaacttttgacctcaggtgatccacctgcctcagcctcccagcgtgagccaccacgcctgtccccgtctggccaattcttgaaaggctcccgtttccagatcacactctgctctgcaggtcatggcctgtcccttgaggtttttcccaagcagcaaggtccgtgcagggattgggagccagggggaatgttgtggaagccacagcagaggcaacgggcctgggcatggtcctgcggggcgagtgggaggcaagggtccgtggggatggtcatgtcagccacactgcaccacctcaggggcctgacttctggagagcttgggaacaggctcttgtccccccggcccctctcacctgccgaccagaaattgggtctcgggcactgagtagcttgcccaaagccctgcctgttgggtggtggcagggactggggtcctaaccccaccccaaggccatgtgcggagacctttactccaccacttgggctggggggtgtgttggggctgggggagccacgcactcgggacctacaggtgctgcttgtgcaagccccgccccgccctagagcaggcctgcaggagtggcagctcgggactcggatgcaccagggcgatatgtggagcaaccagccccgctgcgcacacagagggggcgcctgctacccgctgg

SEQ ID NO: 524 - DNA, 147383 bp, Homo sapiens
  source 1..147383: mol_type = genomic DNA
attttgatgactgaaagtcagagaaacagccagctgaatcagctccttcttgggcagtggtttagcctacttatctcatatcagacctaagggtccagctgcttttccttggttctaaagagttctattctggccaggacccatcccgagacagacacttctgtctgcagccctgaaaactagaggtcaatggaagggctcaaattaaaggcccacagttgggcttacaactctccatggtgttcaagccttctcagaggagctggtgtggtggagccagggtcaaaggtcatagtaaatagaaagtagccagctttctgcctgcataacatcatcttgcctaaccagactcaaacgcttaattctactgtagtattctttggacattcttctttagaactacgggggcgggggggggggggcgtgtttattttcaacaaccacaatcatccttatctttctgaagatgtttccaaaggctgagaacagacccctttcagaacctcggtaggagaagtattaacagttggaaacatgtcagctgctttatggaggaagcacagcccaggcctggtttctctgggctccgtgataacttggggcaaggcagccagtgcgaagcgtggtggcaggagctggagagatggagagcggctcggagaagggcccctgcttttcagagttgaaacaggagccctctgagagaaagagatactgcgtgtggcttctctgaagccttggagggcgacgtggatgacacagcatcagccattccatcgcggggtggggacacagtggcggcaggaaccgtcctcagcccctggcggccacggcagttccccgctgaagcatcctttgtggggtgtgggtaagggagggggaccaaagtcgggtcggagttgagtttgttagacggcgagcacactcagggcggcagcccgagtaagaaggatggccccgggagagaaacggctcgaagctaggggcggggtgaagcgcctgctccttaatctcctgccccatcatccactcgccccacctggatgcagagcgaggaccgcgtggaaaggaaacggcgcgggcggggctccccctcgcagatgcctcggagacccagaggggcggcgtcaggccagggccccgagccctacgccccccatccccccaactccagcgcctctgaggtgcccctctcgcaattccgaggcatcaccgtgtctcccccgcctccgttaaaatagtgaaactgcggagtgaagtgatggaaagccgggggcggggagtcgcccgcggcgaggggctgcaggggagggggcgcggtggccgaataaggtggcccgcgagcaacgggacgattgggatcgcagccagtcgcggcctcccggacccttcccctcgggcagcccggccctcccatggcccggggcgccttgggagggcgtagggcaaacctggggctgcggtggggggtggggaggggactccacctccatccatcccgggatggcaactgcggtcaccctgctaaagtcggggcgggggcggcggtcctccccctcaccccccccagtccgagcgccgccgccgccgccgccgccgccgccgcggccgctcagtaacacgtccccaggagactcgcaggagcaacacgtgatgtgtctacttatcagggtgagagggggagagcgagactccgagcgtgcgggcgaggaagctgggcggggggccgagacgggggccgggacgacggctggggcgccggggtcgccagctcctcgcccacctccctccctgtgggagaagaggaggaggggaagtgactgcggagttgatgaactttgcacatccagaaacgccattttgattccttttccggaacaagtttgcatctctcctcggtctctccctgaagcccaccggtccccaacgcatcatgccagggagccaagcgtcctgcccggccgtaagtacgtgccccggattccgactcgcggtacgccggcggcagcgagaagtctggggcacagccggagcgaccttttaaagaactttggggatggggagggtgaagtctgcagagcgcgttgtacttttgaaactcggtgtgtcccggagccggggacccgcacgccccactccgcgcagcgtgcgctcgggccggcggggcggccagggatgagcggggcagccctctcccctcgggctgcgcgccgggccattcctcctcctcctcctcctcctccccttcctccgctcttttccctttcccgagccgccggctctgccaaccagctcccagcgcgagccgccgcagcgccccgccagcaggacctgatgcgcatccatattagccgtccgagcgcaggaatccggcccgacccgcgccgccgagtttatttttaaccagcaccgccgggactcggatggtgcgcgcaccgccggccagaaacatcttcccagcgctgctctccatcttccgccctctctccctcgacatcctcccccccatgtgggaggggaaacttttctcctacatactttcgagtccttctcgggccgggaagcgcggagatgacggcgcccgccctcccgccgccgccctaaggtatccgggggtgcctgcccggggtgctcgcgcgggggtgcctgctcggggctgctcggtgggagcatccgccgcgccctgctctgcggactttgaacctcccgggcggacggcgccggccgggagggggccgcgggcagccccgcgccctcgcgggttcccggctggcggtcgtggtcacgccgaccaccgccccggggggcctggggaggaggggaccgggccctagccgtgcgggcacgtattgttccctcgcccttccgttggcggggtgagtgttttcgtgggagccctcggtgtggagctagcctgcctcgcgggcggggggggtggggggctcggcgccgtcacgagcacaggaaggaggccgggagcatccgaggcggggccggccgccggggcccgctccgccgcccagctgtggagcgcgctcggaaacttttgtccgccgcccgctggaccagtttttcacgagttctggggcttcccttcctcctcccatcccggcccccggcgtctagctgggtggggggagggggcctgttgctgccccccccgcccccaacttcccgcacaagccttgggccgggccccccgcgccccctccccgctcgcggtctcttaggaaactgcgaccttaatggttgctaaggagcaggggaggtccttcccgtcgccgaccccctccctgggaagcggcgtgttttctggaccgggccaagggcgcgtcgaggatgtgacctgctccgcggccgcgcgtgagtgcggggcgcgtcggccgagcccaccgatgggcgaggccacctttctctccgggcggggcggggagctgggggacgcggggaccccacggggtgcgggcccgggccgcttgacaggcgccgcgtgcagctcgcgcccctcggccgccgtgcatccgtgatgggttataaaagaggaggaaagtatttctccttgctcagcagatttgccctccctcgctccttactggttaggagatagaacgtgagcccagatccggacgagcagttcacattccattacgaaattctacacggcttcagagccagcagcagcacacattcggggcactttggaggggttttcttcgtttgaggatgctcctgctgctgctgcttgtgatggtggtggatgtggagagagacaaaagggtgaataaaaaaatataacgttttggtatgttgaaaaacctgtccgggggttttcattagtagaaaattgaaccctcttagagtttagatttaagcttagctctttaaaagccagtggaaataaagtttgcctgttgaatggtgttgctggaaatagcgaggaatttctgtcttaagaagaaatgatttctgcaaaggcagagttgctagtgcatctccattatttttgatattttttttcccctttatatatgtagtggaccctgcatgtgtgcgagttgattctgaaataagtttaattgaagtggaaggtggggaaaagagaactgccaagaaaagaatgtggtttagttttgttttttcacacccatgaaaatcatcctctagatttggtgctttttcaagtaggcaggtatagtttctaagacatatttcaacccggaagtctgagttagatagaggccaaagtgttggctaaaacctctttgaaaaacaaacgttgagttttgtgctatcttcaagagtccacagaacttctgaaggaatgggttcgagctactctacaagtaatttatacaaagacagaatcactaattttaggggtggtgtgtgtgtgtgtgtgtatgtgtttacctccgccctttggagggagccttctgggtacccgctgatgggtcctgctttgatgtgctttgagctttggttacactgatgaattaaacatttgaatggctttaatcaagttttaaatgtgttaaaaaaatacctttcccccatttttacaaaagaaaaggagagaagaactctttgatttagttatttgcttagcttgtgctccattttaggttaatgaacttgcattgtctttgtcttaaaaatactgctaaactggttgcattttagaatgtcttgtttttaaagaggatttgctggatgtgtaatactcttaagaaatgctgccgatgcttaccgttttgtggaatatcattctctgggtttttctagatactgctttatttctcatcagaaaatcagactctaagcccttatggcagacaagtatttgttatgtgatggggaacatgcgtcttattgagctggtacaggtagtgcatccattcctaactagttacatcatccaacaagcgaccttttgattgaagggtcttttaaatttcttcgggcagactcccaaggccttatttgtatccaacacaggtacagcgtgttgaaggaagaaaataaacctacacgtattagtccagcatctgatcaacagcagtttattggttacctgctgtgtgccaggcactgtacagtgtagctgccttaggtcgtttttgctcttcaattttgaactgttgcgttattccacttctgaggtcagttaggaagtctttgcttgctatcttatgcttgcttgctaacatcatttatcaccttcagctaaggaaatgtcctagttaatgaagttttaaaatgctacccttttaggattttgctcagcataattaatataaatttaactcctataagaattggttaaatatattctttggaaacagaagtgaattcttttgatgtttctgttcattatccttctgaaaagtaggtggtgcttagaaggtcataggataagggttgctaagcagctaaacagaaggatgctaaaattaaccaaagcatttttgaaagggagtcattccctgttttacattatttactaggtttagttaatttctgaatcttctatgtcctttgacctgggaaggtaggatgttaaagtttgttttggttttgttattatatttaaataatctctttcttttgtaagtgtctttaattgaagttcagtactctatgaccagccttgtggtgtcagatggcagcttgtctggtggacttcttgactattaccagtgtgttcaggttgaaccttcctgaggatttgtgtgtatagtaccctcttatttctagtattaataactgattccatggtttgttttggaaattctgcataatccataaagttatgtcttttattccgcatgaaacagatttgtattcaaagatagaaatgcaatttagtatcagtagaaagtatgcaatgtagtctgtcctgataaggggacaatagctttctttccccctttactgagattaccattcccttagattaggttttgatagggcttctcctccatttcattccacctccctagtgcagtttattccgcccagttcatagctatctttttaaaaataattatattaggttcagagtatctttggaaggactggccaaatgtcagaaaacaaaaataggtgtgatgtacattacatttctgccaaaagtatgttcaagtatcttgaagtttttcattgagataaaatggttgaaatctaattgaagccatgatgagtaactatcatctcttggttgaatggtaagcctgttgtaagccaaaagtttccctgcttcaaggttaatttctgtacatctgacctattgaacaggcagtgttgagtcatattttttatgtccaaatataattaagaaattgataaatgtattttctttctgtttcttttctctctttctttcctgatttagacagtgatttttgagtagaagtagccatggcagttttcaaagagcaagggtcagacagtgatttccacaggggggtgagggttgcagggttgcaggtaccttatatcaaaggtaaaaggtacaccgtatgaaacccagagggaggcatacggtgtgctctctgaaatgcatcacttatttttcatttcccccactcccatagaaggcagaatacagaaaagaaaactactgttgttttcattactacggaggtaaaagaatgaggaaggtggagaggggtttttccttttttgttagcagtcctgtcggcaatgtcatcgactgtgctccgcccaatttctcttgtcacgttctctggtgttcagcgtggtctgaactgcagccgagtgtagctggggattgcactctgccgttggcagtggcgggttggggtgaagcggatggggaggaggagactgggagcgatcggtgcatcttatttctggtgggacttcaagggtactgaagttagccagtctgcccatcagtagaggtggctgactgtgagtaggtgcttcagacgaaagcatgggagagggtggagattgtttgttcagtgtgattcaagccagtaaagctaagagaattcgaaaacctctgtgaagtccggggactggggactgggtcctgactgctcctgcagggattcacctgagggcttgcagacatcatgagggtgggtggagaaagagaatgaaaacccccacaggcattgtcagacagccagagtgaagagaaaacgtctcagtgggggtaattagataaagcttttaaatgctctatttgtttttctctagtttgcttggtatttcatctctttcccccttttcagagactatgggatagaattgttatgaaagtgtctgatacttctggtggtttaatcactttaaaatttttctttttcattcagatataccttctaggacttagttaatttcaccctgcttttgtggaggcctttagcaaagattccacgttcatgctgagaggaacactgtgggagttgggtgggtatgttgacccattttacagctgcgcggtggtccacccgggggctgttaatgaatcaaacttggaacccagaactcctaactccagcctagccctgtagaacagctgctttttagagtcagtttgacctcaggaggacttagcagcattaaatatatactgcctatttatctccatgtgtatggtgtgtggtttttaaataagaccagatccttttcaaaataaacctaattgagtttgaaggtataaggaaattttaaaaagcacttctgctcttggtagcatttctgttgatgaactgtgatgacatgtatctttttagtagcctttctacctcatgagattgttgtaaggataaagtagatgttccagaaagtcaaaatctataaacggaagaaagtggtatattttgagctcaggaagctttgtgggtatccattctggatttcctttccagaattttgcacacctccattaccttagtcaaattttgcctaggagtttatgttcagattggggaaatgcagcactttgtttttgtttttagtgctgggagactaacaggactagcaaattcttcttaatgtggttcacttaggtgaggcagagtcttgctgtcgcccaggatggagtgcagtggcacaatcttgcctgtctgcaacctccacctccagggttcaagcgattctcctgcctcagtctcctgagcaggtgggactacaggcacacaccaccacgcccagctaatttttgtatttttagtagtaacagggtttcaccatgttgatcagggtgagggatgagttttaaggaaaaagctgatgacaagcttggggcttactctttgaagaagtggttctcaacctggtgggtttgcccccaggggacttttggcactgtctggagacatttttaagtgtttctggtgggggggggggcggcagcggggagctgctactggcctttagtgcatagaccccaaagatgctgttccacatcttggagtgcacagaacgacccccatacgtcagcagagctgaggttgagaaagcctgcttgaaaggtacagtagtcgtggcctgggtctcatctacaagtccactgggtgcgctgcctgtattgcatgcgatatatttagaaatctgaaattccataaagcaagtaagctcttatttgcctctgaggtaccatggttggcaagttcgaagtttcacagaaaatttggggttgaggaaaatgttaagtggcattaaatatatttgaaaaccccgtagtaaatgaaaattctagaagtcatctacttctaaaacaaactagattcattggctttgtgaagctgttgtggtcgatggctcagctttcccagtcacctcttcagttatttgggaaacttgctctggtgctgtcatctgcagcctccttcatgttctaagttatgtggagtatacctttttttttttttaagtgtttgaactagcccttacttgcttaacagttaatgtttttgcattcgtagtctcccttgttttattttctcaagtttttgcaaaattcttacataaccgtctgccgtttttatagggcagtgtttctgagccgggtgctctgtccatacatctcctcttgagagggtggatggctgccagctgctgtggttgggagggatagggagggagtaaggggatgcagggtaggaggcggtgattatttttatgttaagggaccccaggcctcagaccagaaatgtctaatatagtgtcaggagtgatcttttagccagcaagtgttaactgatctgacccttggccttcccccccaccccccagcctatcacacagacaggaggtaaggaaaccatagaggggagaagaaaacagggagacagagatcgaattccagaaaaggaagggctgccagtggtaggcagagtcacccctagagtggcctgggctcccactttatagacatgtgcaatacttgaagatagctctttttacatctaaaccagcggttagtcagtgtcccattggtgtcagtcgcactgatggtgctcagggccattgctctgcagccacctttgcagtcccatacgtggtaacgagtcctgttcctgcagaacgcactctgcgttctggtgcttttctgtcttctcgtctaacctataaactgccaactcccaactctatatctccatttacaacttctcccaagcttgaaccttttgtcaccctgatcaccctgcaagtaccttaccctgcaggtacttgtaaaaatgaaagtcctctcccttccttctggaaggtgatcaccatccacccagccttctaggccaggagtcttactgccgtcctgacgtatgtctgtcctgccccaatgttcgatcagtcaccaggccctctgcaaaaccacactccagtctggccctggcattggctgttctatcgtttctgacctaaggccctcatcaagtcacaaacgcctcccaagttaatttcctgccaccagtttctccttactgcagttcatcctccactctgctgccagaatcatcagaactaaagccgtgcgtggtgtttgcctgcttaaaaacatctcttggctctctgttgtctacaggaagaaatccaaactccttaacttggcatacaaggaacttcgtctgcttccaagctgaatttctagtctcagctcttgtcactctcttctaccccactgccacactgaattgattcttactgcctcctgttgcctggattgttcattctgttgcatccccatccccttccttcagcaataaaaattttgtactctttttttcaagacccagcttaaatactacctcttctatggagaattagctcttctgttgtgagtaacttttacccccatctgtcaagtcttgtctgttgtaatttatctcttaacatgtttctctcacttcaagaatattttcccatctcctgcacctagaacgattgcatagttggtgctcactcaccactgtgtgttgatttctgatacaaaaatgagagtttctgaagattttggagaatagccacatgtaatttggaagctaaggcctaaatagtgctacaaattcaatgaaggaaatagacatgaactaacgatttcagcatacccatcatgcagaaggtggtgctaggtgggaaagaattaagttctttggtgggaaagaattttgaattacagaaattctaaaataaaagttggctcagcttaatgtaaaagtgaaaaaaactccttgttaatgcctggttgcactaaaagctgtcacactggggcctttactaattataaccatttttcatggctcttgatttgaagtttacattaaataggagagatgggcacacagatcaaagaccaaaatcatttcagagctccaatgtgtgggcccattttctctgcttagttagagttttgtttcattagtggtatgagttaataggagtgttggtctgtgtataatttagcttctcttttttccattactcgtaggattcaaaacagaataccaagccagaaatctacagggtataaatcttgctttatgtgtttgtatgtgtctgtgtatgtgcagtatacacgtggtaatagttgattttagatcatatttataaaaataatcattttcactgttttaagggagctccctttattctgacacttcagtgtaaaaaacaaaacatttctctgaatatacaaaatcaaaatcttaattttctcataaaagaggtagatatgtcttcagaaataggggagataaccaggaagatggggtgggtgttctgaaacacaaaggtgaaccatgtgaataggtttcctgtttttttttttttttttttttttttttttttttttttgagacgaagtgttttactcttgtcaccgaggctggagtgcaatggcgcagtcttggctcactgcaacctccgcctcccaggttcaagcgattctcttagcctcccgagtagctgggattacaggcgcctaccaccacacccagctaatttttgtattttttttagtagagatggggtttcaccatgttggccaggctggtcttgaactcctgacctcaggtgatctgcccaccttggactcccagagtgctgggattacaggcatgagccaccgcgccccaccagatttcctttttaaacaatgaatttttattttttatttttttggagacagggtctctctatgttgctcatgctggtctcaaattcctaaactcctgggatggagcagtcctcctacctcagcctcccaaagtgttgagattacaggtatgaggtatgagccactgagcctgacatgaatttaaaaaagcaaaaagaagaaaatgacatagtgtgtggaagttcttggtattttttatacaagatgaaatcctggttgattaaaaatatattactataaatattttttaacaagtgcttatctgctaactagagtttaggctcagatttggcagatacattcagatataatattctaacgtagttttatttatcaggaggctcatatattttcctcttcaatacagaaaatagttttttgttttctttttgagacagagtcttgcactatctcccaggctggagtgcaggggtggaatctcagctcactgcaacctccacatcttggattcaagcgattctcccacctcagcctcctgagtagctgggattacaggcgcatgccaccacacctggctaatttttgtatttttagtagaaacagagtttcactatgttggccaggctggtctcaaactcccaacctcatgtgatctgcccgccttggcctcccaaagtgctgggattacaggtgtgagccaccgctcccgcccagaaaataggttattttaaagtcagtttttcctttgctttaggaattttaaatgttttggaggataattttataaaactagtgaacatctcaaacaggttttctatggcttggttagttaaatctgtatgtatttggctaaagtgttctattaaaagtttaaaaccaagtatagtttaaaggaggcttaacttgcgtgtctctgaatttgatttgtatttaaatcatgaaaagaaggtttctgagaaccatttgttcaaaagcttaataaggcttcacaacctcctgtcctggagtgtgattcagtatgagatttagcgtccttttgaaaatagtcagtttttcaccaccaaatttgccaatcccatggtgttttttttaattttttttttttttttttttttttttttttagagacagggtttcaccatgttagccaggctggtctcaaactgctgacctcaggtggtgcactcacctcggcctcccaaagtgatgggattacaagcgtgagccactgcacctggcctcccatggtgttattatttttttaacatttacagatttttattgattcaatacatatttgaatatccactatgcaaggctactgtgttaagcaccaagtttactggtatgggaaagatagttgaaagcctcgtagaggatatattgcatcaaaagaaatggcaggcgtggtggttcacgcctgtaatcccagcactttgggagaccagcctggctagtatggtgaaaccccatctttactaaaaacacaaaaattagctgggcgtagtggcgggcgtctgtaatcccaactactcaggaggctgaggcaggagaatcgcttgaaccctggaggcagaggttgaatgagctgagatcgtgctactgcgttccagctcgggtgacagagcgagactccatctcaaaaaaaaagaaaaggacacgtgttcagcaactaagaagtcatttttatatacacgtgctaagtgccaccagtgtgtggcctttgtgtgtgggggaggagtgaaagatgctgggaggccggtcaaggaaggcaccttgtggaagtgacatttgagctaatagctgaaggatgggtgagaggaaagaaaaagcgtcagaaaacggcttgtacaaagaccctgaggttggagagaggtgtgcgtccaggaaaatgagaaaagcacagtgtttggaggaagacaagacacagaaccagtgaattacagggatggtgcggtagataagggctagagcaggctgctaggaactctgggaagctacgaaaagtgttaggccagattagcatgatgagatttgcatttttaaagattattcctacccagagttgagaatagacctggctagaaggaagcaactgtttgccttctgtttggaagaatgtcagttagaacgctagtttttgaaactttgaaaaccggtggtggcagtagaaaaagggagcttagaaggatttgataaaggtttaagaggtgggaggggcttggcgatgaggaagggtcgtggaagggagacatgacttcctggtctctggcttttgcagctgagtggatgatgatgcctctgacagtgaaacgctggattagtcagggtttacgaacaaggtgtgttctctaccttttaaagagctatatttatgtccccacccccaccccccgcccgccttttttagctatttctttacttgcactgtgttttagttgattaaaaattatgtacctaggccgggcgtggtggctcatgcctctcatcccagcagtttgggaggccgagccgtgcagatcccttgaggtcgggagtttgagactggcctggacaacaaggtaaaaaaccctgtatctacaaaaaaatacaaaccttagccgggcatggtggtacacacctgtagtcccagatactcaggagactgaggtgggaggatcacttgaacccaggaggttgaggctgcagcgagctgtgattgtgccactgcattccagcctgagcaacagggtgagaccccttctcaaaaagaaaaaaaagtacatggcatggatgaagcatgaacagtacttatgtaacagtgagaaacagacgttatgttcttaccattggggaaaaaaccaatggctgcctcgtattctatcctcctttttcctttttttaatttcccgatgctaaaaggaacaggaaaaatttcttgtagatggtctgagcttttgaatgatttttagatgagatgtacacctattttttttttttttgagacaaggcctcgctctgtcaacagggtggagtgcagcctcgacctcgtgggcccaagtgatcctcccacctcagcctcttgagtagctggggctacaggtgtgcgccaccacgcttggctaattttttttttttttttttttttttgagacagagtcttgttctgtcacccaggctggagtgctgtggcacgatattggctcaccgcagcctctgcctcctgcgttcaagtgattctccctcctgcctcagcctctcgagtagctgggattacaggtgcctgccactacgcctggctaatttttgtatttttaatagacatgaggtttcaccatgttggccaggctggtctcgaagtcccaacctcaggtgatccacccacctcagcctcccaaagtgttgggattacaggcgtgagccactgcgcctggccagtttttgtatttttttgtaaagatgggattttactatgttgcccaggctgatctcaaactcctgggctcaagtgatctacccactttggccttccaaaatgctgggattacaggtgtgagctaccacacctggcctagacctaaatcttaaaagcactgaagtgtgttttagcgatgctttatctgtttgacttgagcatagggttcatgggaagagcctttgggtagggaccaagctaggactctcacagtggctcaaaccttttacttaggagcatcagaactcatttcatgacctgattttccaacttatttcttagttggaaccacataaagtacctcagtggtcacccgatgcccttaatatattagagttacattagtattttgcttgacctgtaatctgtgtgaaaacatagttcattcagtcagcaacacttgttgtgtatctaatgtgttgggccctccactagatctcctttgggtgccaaaggagaagatttatttgacccctttcacaaggagtggaacctgtccccgtggagtgattgtctagctggtatttaaatacctctggtgatggctgacttgctccctacccccaggcagtcctttggtttctactacgttaattaactttttttttttaatggcaaacaaaatctttttggaacaaaaccgacagtgacgtgttttccactgagttggtacacactagaagctggagtgcaggtgtgctgccctgcttgatgcaatgcagggaggcagggtgcaatctgaccctgagacttccatcagggtgtgctccggccactcagcaagtggttgtcacctacttaggatttctgcttcccgagggaaggtgcatgcctcacttggatgcatggcccatccccttctgtgtgagttgggtcaccagcctttaagatggtctcacatgaaagtcttattgggctcccattttggataatgcttttctctaatatcatccgaataactcatcaaaacctcaggtgagcatgctccaaagaagcttctcttttataaggtatcaaccctgatggatataacctgaacattcctttgggccccaggtagtatactgaggagaacgtgaatttccatctctctctcattttttttcttttttcttttttaagggatggagttttgttgtgtcacccatactggagtccagtgttgtgatcacggctcactgcagtctcgacctcccaggttccagtgatcttcctacctcagcctcctgagtagctgggactacaggcgggcaccgccatgcctggctaatttttaaaatttttgtagaggtggggttttactatgttgcccaggctggtcttgaactcttggattcaagtgatcctcctgctttggcctcccaaagtgctgggattacaggcatgagccaccgcgcctggcccagccctgtatttggccagatgaattgaatagatgggaacaaaactcaacaaagaccttctactcctcactttttctgattggaatagcttggtgaagagatggctgggaagaaatctttgaaaactggacttaagcgtatttttgaaaatttaaattttaaagtactctacaaacaacttggagtctttcacttcagtgtgacctaagcagatgtgtagatttagaggtcaaatgagaagtgtgttataaatacagcatgctagataattgccttgtcatgaatatccaaaattgggggtgataatacatttagaaaccagtttctgctgacaagcatgtatcagctcacttttggataacccatccacagctacttattttgaagagtgctggatagtggtgaccacacatactctctgttgggtaatgtgttttaccttaaacatttgtgtttttgcctcaccgtggtgttgcccctcgggtccctggtttgttggtttctctaggctgtggggtattggcatgtcttacatacggctgttttctggatatgttagaccatctgatgcatcatctgtgaatgaagttgaatgtgttttttttttttggagacagagtctcactctgttgcccaggctggagtacaatggtgcaatctcgtctcactgcaacttccacctcccgggttcaagcgattctcctgtctcagcctcctgaggagctgggactctgtacaggcgcgtgccgccacgcccagctaattttttgtattttaatggagacagggtttcactgtgttgcccaggctggtctcgaactcctgagttcaggcagtccgcccgtctcagcctcccgaagtgctaggattacaggcgtgagccaccacgcctggccgaaagttgaacgtattttacataaagctcctgaggacctgaggagattactgaataagttaataaataaatacatgttttggaattttagtgaggttttctcagagaagttcagagtggcatcagttaggccaggccatgtgatgtgtcttttttttttttttttttgagatggagtcttgctctgtcgcccaggctggggtgcagtggcgtgacctcagctcactgcaagctccgcctcctgggttcacaccattctcctgcctcagcctcccgagtagctgggactacaggcgcccgccaccacgcctggctaatttttttgtatttttaatagcgatggggtttcactgtgttagccaggatggtctcaatctcctgacctcgtgatccacctgcctcggcctcccaaagtactgggattacaggtgtgagccaccgcgcccggcctcatgtgatgtgtcttaagggtatctgtgatatgtcccttcttcgtgtacccaaaggcctgtcatcttgctaagaatgcggcattgggatacatggtataaaaattactttttccttaggaaagtggacactctgctttagaaagagagtgtatgcatgtttggtcctgttgcggtagtaagctctgggaccggggtggtcacccgtctgagagttttgtcgttgattttattttttgtttaagcagttcttgatatagatgtggcaaacacggtggcctgtgtgttctgaggcttgctttgtgcctttgtccttccattctgccctggagagtagatgctgtgtggtcatgtgttccttttgtggtgtgctcaagaaaagggggggagtatatgtgtattggggaggcggtgtggttagcattggccaaattattatatttagagatcatgatttatgtcattgttatctttgcaggaagtggaattttggaagggctcatttggccagcttgtctcatggtagctaccagaagtctcatggtagctagcattgcctcttgtgtctcttcaggaaactgagtacacagaaatccagtcctaaacaccagaaactgcaagtggttatattacaaattaatctgtctagagtacttttaaataagttcaactcccagcattcaagtaactccatgggactccattgttataatttagttttcaccctttgttggttgttaggcttttcatgtagaaatactcccagcatggtggcagtagaagcagcagtcataagatctaacatttattgagcctgtactagttaccagccgcctaaattcctttcatgcatcatctcattcattcatcacaacaattctctgaccccatgatgtagatgcagttgttatccccatgattcagatgaggaaattgagacccagagaagcagctagctagtagggctcaaactgtgaagtgtgactctgagctgtgcttctgacctctggcagactacctgtcatagagacatgatccattcaccaaacaagaactcactgaaaacctgctgtgtgcagatccttccttgtgaggcacatcgaggggaaaactgttctggcttgtggaaacagcagattacagcttaccagtggaacagcttattctagctggtatttgacaacataagctagatcttcacttctgtgatggtcagaagggagattcagtgttttgtggaagtgaggggtttgcaaaagtggtgttagtacacaaaccaggtgactggaatttgggagcccttatagaagggaggtcaacaagacactaaagcataagactgtcagggaaagacctggtggagaggtagggtgaaacactggacaaattctgccaagtatggaattgtcaccctgttccccttggaaaggttagagtgtagaacagagatgatcttttgcgtggtgggaaatgtcccagaagtggaagagtggggccttggactccaggcttctgctagtcctccatgtggttaatgggggggcctctcctgtctcttgaaacctttcatgtgggcaccacttttaacctccctgaaagtactcagccctgtttcagactcacaggttgcctacttttgaagagactctaagctctataagcatttgggaatttagttttgcattgggtagggccagtgccttgagaacaggtccattgttgttttataatagtttattattttacataatatggaaactcaaggttttgcctcagaactggtattggggtgattgtaagaggcccagtgacatgtggcagtgctcaagtgtgatagcctctgggaggtgttgtttctttgttgttttacttttcaagcaggaagagccgtgtggactggagggcaatgagaggaggctgtcctgtctcttagagtgtgtttgggatgggggttcccagtgtgccttgctcctttgtgagggcatcggagcaagttatggaactggcagatactgaattacggtaagtacttcaaggtctgtttcctgcttcttcctgtctgcggagaaggactgttttttgtttgtttgtttgtttgtttgtttgttttgagacggagtcttgctctgtcgcccaagctggagtgcagtggcacgatctcggctcactgcaacctccgcctcccgggttcaagtgattctcctgcctcagcctcctgagtagctgggattacaggtgcgcaccaccacacccagctaatttttgtatttttagtagaggctgggtttcactatgttggtcaggctggccttgaactgctgacctcgtgatccgcccgccttggcctcccaaagtgctgggattacaggcgtgagccactgcgcccggcctcgattcccccccgacccattcttgttgcccaggctggagtgcactacaacctccgcctcccaggttcaagcgattctcctgtcttagcctccctagtagctgtgattacaggcacacgccaccacatctagctgatttttttatttttagtagagatggggtttcatcgtattggtcaggctggtcttaaactcctgacctcgggtgatctgcctgcctccgcctcccaaagtgctgggattacaggcatgagccactgtgctggcaggactgttttgaaactagtaacagagaattacgtcttgtgtgctaccagctcagttataactgacctatcttctctatttgctactgttattatcattgttattttgctcacagcagctgggtagtttcagcaaaataatactgagaagcaatctggattaggaggccagcattctgggctccttttttcccatctgtggaataccaccatcagcaagcctgcatcaagaaccgtttcttgacacttgccctgggtaccagcctctggaaatgcaaggatgggtaaaacatggtccctgccctaaaactcgtcagtgcctcataaccagcaaggacaagtggaggggcctgcaagtgggaagtggttgggaaaagaagaggaagtgatgctctcaaatgtgcagggcttgtcatgtggaggaggatgatgtggggaaggaaaacgtccttctaggcaaaaagcagtttaagtacaggccctggagtatgaaaatatgaggcttagttgaggacagggtagggcaaaaagtggaatgtgactagaggatagggcttaggcgtgttgtattgagttggaatgatgagaagtgttggccctggaaaaatggacgggggctcggtggtggagtctgttgtgagccatcaaatgctttggagcaggactgtgatgtgagcagctctgtggttcagagaactgctaaccctttagaaaatttaagtcggagagaagacaaggtgtttagcaaactgcagtgtgaacttggaatttggtattctctttaacagaataacttcttccctttttttttacaagagatttttcaacccaggatatgtgggctgccttctgaagccttgttaaatgataggggaaaggtgggaacatttattttcagcaaatataattcaacaatgtttagacttccctaattgtgttgtactagttggtacttacttaaggtcattagagattggaattctttagaggagagggactcatttctcaaaaatattgaggatggacactgggagctgaactgggacaatgtattcctcgtaaccacgagtttggtgtgtcagttgggagtgactgcagggtgggataggtgtgagcagagggccagctaatttgctgtcttgatgactctgtgggtgatggctttaggggctggcagcgtctggtggaaatagaatctgttcaaaaggtggagctgccttacagcaattgccagctcgctgctcacctgcagagcatgtgccctcatctgggtcacgactctgcccctcagatgttcctggtcctctgcttggatccacccccttcactgcagctgaaacagccaacaaaggagcatcatgtgcccgaggcctgaaaagttagagtggatgtgaaggaagtcagactgcaggccccaaagacaattaatggtgtagtaattattgtagaggcacaacattgccttgtactctcaggttttcagagtcctctggggaagaaatacgaattttttatagcctgactttatacatttcaaagcttgtactcatggactaagggacttggatgggagggttgtgcaaaatgggggtaggcctcctgtaaacttggtgggttggacagaacacatacctcaatcatttccatcactgaaaacagattgtttcattttatgattttccgaattgttggcgaacattttttgtttagttttgttttttcatgtgttctcgcatttgagattgtgcaggaggaagtaggattctggtaagctgaagtggagcttttgggggacctggaggggagctgggttggaggcagtgtctgaaagtgctgcttttagtgggttcgaccagggcacactacttaggggaagcagagcaccatgtatgtctctgtgtgtaatcatctcaacaacttcatgaggtgtagctgttattttctcctttttaaagacaggaaactgaggcttagagatgctcctgtttctgagatcatgcagccagtgacacatgaccaggaagctttatggcaggctttaagagttgttcttttagataatctcaatatacggtgatacctggagagtttctaccacttgactcaatttgtttgtcttggggccgggcgtggtggctcacacctgtaatcccagcactttaggaggccaaggcgggcagatcacctgagttcaggagttcgagaccagcctggccaatatggtgaaaccccatctctattaaaaatagaaaaattagccaggtgtggtggtgggcacctgtaattccagcaactcgggaagctgagacaggagaattgcgtgaatccgggaggcggaggttgcactaagctgagattgggccactgcactccagcttgggcaacagagtgagactccgtctcaaaaaaaaagttatgcttttgagcttaacacattatttgaatacctccagcttcatctgaaatatccttaattgagcaattgctatgctaggtttaggcatggtggagtttggtgtttcttgcctttggggagttgacattatgaaaggaattcttatgccatgtggaccctgagccaagttcccatgggaaggccaaggctcacagaagctcgcaggagtgggtctgcacttctaggaaaagcacaagtaggggctgagagcccagcaggaaagcaggttggttttgagtttacagtgtaatttggtgttgaggaaggtgtctgagaagatgggttggagggatagtggggcaaggtggaaggtggggcaggatttgaccttttcttcttaatttaagtggtagggagtccaaagtttttgagtagagaagtcacagttggcctgcttaggccttggagacaccctcaacagtgggcatgtggtttgtgtgtctgtgctttgggtgactgccgtggctcacttcactgtttgctttttggcctgaggcagagagtgcctcccatggcagctcgtacaggatgaaccaagaggcagcacccaggatatctgaattgcctaaagccactgcagtgatgtacacacatagcgaagctttatttctttacagccatagacttgttgaaaagctgaatcacatactttgcttgatatttgactttgtggttaccaattccaggtgagccaccttcgagaggggtaacatcctgttgtcggaaaggtgcagccgggcagcagggaacctgggttccactttagccctgacatagaaggttttggttcatgtccctttggtctggtaggcccctttttggtgcttgtttacggaactgatttatcttgtttataatgttggtagacgggtgtatataccaagacctctggtttactgaaggtagggccaagagctttccagcagtctgttgagtggagctacgggtcagtcagcacacctggcccagagcaccgtgagctggtgaacctacttgtcccaggtgttgtagtgtggcacttgagcccactctactgactctcccctccctcactcaattttggagtcttgctgtctttgcctgttgctgttctctgcctcagcccaaaaggagacaaggagtgccttcacctgccctcactgggggcaagagcaagtctggataaatgacttttactgataattcctccaaatcatttttatcctccatagccaacactccttcctctaaaaacctgcaaagtagtagtagtaaatccctttccattcctctcctttgctctttcaggcctctggtaaagctggaagcgcctgaaagagaggcaaccgaagccaaggctgccataatccacgcgctctggacgtcaccctgggtgactcagatttggttgcatttgtcatttcacaaccacctgcatctgatcccactgtgtgggcaaactgtctgctgggagtctctgcctggtgcctggtcttgggggcatagtgttcttccccagaattgcttttcccagctgtttctctatagctttagtcatggggttcactagtgaaagctgccatgcctaccctccccatttacttttgttagtagtcatttctttttttttttttcgagatggagtcttgctctgtcacccaggctggagtgccatggcgtgatcttggctcactgcaacctctgcctcctgggttcaagcaattcttctgccttagtctcccgagtagctgggcttataagcacctgccaccacacccagctaacttttgtatgtttagtagagatggggttttaccatgtcggccaggctggtctcaaacttctgacctcatgatccatccaccttggcctcccaaagtgttgggattacaggcgtgagccactgctcctgactgttaatagtcatgtctttttttttttttttttttttttttttgagacggagtcttgctctgtcgcccaggctggaggtcagtggcgcgatctcggctcactgcaagctccgcctctcgggttcacaccattctcctgcctcagcctccggagtaggtgggactacaggcgcccgccactgcgcccggctaattttttgtatttttagtagagacggggtttcactgtggtctcgatctcctgaccttgcgatccatccacgtcggcctcccaaagtgctgggattacaggcgtgagccaccgcgcccggccaatactcatttctaagaagcaaatatgtaccatcgtatgccagtcatggtaaatgctttctgtgcattatcttcatagtcctcacaacagtcctattaaattggtataattatcctcattttgcagatttggaaggtggcatttggggaggttaccctaatcttttcagttacctaacttaatgtacaggaggcattatacctcttgcagtctgtatttcatctgatttaatctttgcatcaacttaaaagttcactgttatttctgtttacagatgaggaagctggggcttagtttaaataacttgcccaaggttactctagctagttagtgagggagtctgaattcaaacccaggccagtgtactccaatacaagtgctcttcatcttttcacttctgcatttgttttttaagtaaaaatatccacttttgggctgacaaagctgatagcttctcgaactcctggcctcaagggatcctcccatctctgcctcccaaagtggtaggattacaagtgtaagccacacgcccggccaaagctgatggcttctattggatttgttttctaatgctttgtccatttttaaatgggggaagaaagggagataatgtactataggttaagctccttgaggactttttttttttttggagacagagtctcctctgtcatccaggctggagtgcagtggtgtgatcttggctcactgcgaccttcacctcctgggttcctgtgattgtcgtgcctcagcctcccaagtagctgggactacaggcacatgccactactcccagctagtttttgtatttttagtaaagatcgggtttttttggtttgtttgtttgagacagagttttgctcttgttgcccaggctggagtacaatggtgcaatctcggctcactgcagcctctgcctcccgggttcaagcgattctcctgccttagcctccgaagtagctgggattacaggcatgcgccaccatgcctggccaatttttgtatttttagtagagacagggtttcatcatgttggtcaggctggactcgaactcctgacctcaggtgatctacctgcctcggccttccaaagtgctgggattgcagatgtgagccaccgtgcccagccgagattgggttttactgtgttgcccagtctggtctcctgggcctcaagcgatccatctacgttggccttctaaagtggtgggattagagacgtgagccaccacgcccagccactttttgttctttttaagcattttattcactgatgcctcccaagcgcttgccatagtgcctggcacatactaggtgctcagtcagtatttgttgaaggaatgaatgcggtaggggttatttgacctgtttcacaggtggcgatattgacacagagcagttgggtgtcttgcccataggcatgcaccattgttgaaaacagcttttgctcttcacacacagatcttttttttcttttaacagattttttttttacaggtataaaatggaagtcattagacctaagtgatgggattgtagagtgtaatataacacactataaataccccgtgtctggtatacaatgtcaacattcagtaagtgactgtgtttgttgtggttggagcttcttttctgcatgtgccctcattttgggtagggttgccacacagataaggaaacttgaaaatttgtgagccatggaaaccttttaaaaacatgtttaattaatgcagtgtttctatctttgctatactatccatcaagcaatacaagtagtcaaattggtgataggagttcacatctatcctgagcaagtcgacaagtgggttatgactggcaagatttgattaaatgatatttgcattttccctgtttacaatcgtagagcattgcactggaaggggcctcagggaagcatggttcgtttcttttccttatacctccttagcttacaggtgaggaaagtgaggcctggagagatgcagggggcaggcttgatgtggaactctggacttgcatgtcacattctcttagacatcagctcaccctgccaaatccaggtgcctggacgggcttgtatgaacttttgtggtggagccacaattattcctactatgatgttagtagcagattgtatcaataatccaccaagagccaatacatcaaaatcaggactgtttaaacattgttttttacccatcataaaatgttcttagccaggcaccatggcacacccgggaagtcccagccacttgggaggctgaggcaggaggatcgcttgaacctgggagtttgaaatcagcctgggcaacattgtgagactccatctctaaataagtaaatgaatgaatgaatgaatgttcttattcattgtacataataagaaggaatatgaagaaaaaacaagttatcctaaattaagattataaatagtcctaaggattaaaaattattttttcatcagaattttaattatttcactgcacctatgcccataatagaagaattataaatgaacccaaaggaaaaaacatctaatgatgcaaaaaggaaaaaggaaagtaaaattgtttatgcccacaagtcagagataaatcattgttgatactttactatttccttttaggtggttttctatggatatatacacatattacaaaaatgggatttattgtggacaataaaacccatttttgtacatgtctttataccatatgttttacaattttaatatgatatgacaagtcttttttggtgtattcaaatattcttgaacatgaaaatcacattttgatgtggcataattttggggggcagggtcataggctaatgttataattattttgcattccctgggcactcattgtgtgagtgaaggaacctatcttctaggttacatgaaaccaacatagtattaaactttttatggtaaattgtgaatatgtagttcatcagaaatttattttaaagagaaaaatactgaactgacaaaatgtgtgtgtttatttttggatagcatgtgatctgtcttattaccccaaacccgtgagggttactgatgaaaaacaaattgagcagttcaaaaagtcctttcgctagagggttggcctctcttgagaggaaggtgtttgttctcttacatagggcactgtgttgtgaatgttaggaatgatgtgatgtgtcctttatctgtggttgtatttttactggatgtttttctttaatcaatgtcatgttatttggacattctagagcaattattccccatctttttaaatgtaagatactcttttaatgtaaaaaatttccagaccaagtgtgattttaattatttttttagattctgttgagaagctctaatgacagaaaaactctatcgacattttagtggcacttatctttattaaatacagcagcattttcatatacttgcaaaataattgtacatatatgtgtaaatttaattgatttctagatgcttgatgagcaaatgaataagtggatcccttgaaatagctccctggagggcccctgccctagaggaagacagatcctgcatatgtaaccctaaagtctaatgtcaggaaaataacgattagactagttctgaaccgcaagtggagttctgtaactagagctaaacgccactgtatgacaagttaggaagatatattttcttccacctgttcatacactgaacggtttccagagcagcccttgatatcacctcattttcctcatcatttcaaagaattctattgggaaagagaatgcaatcagccagattgtaagaaacatttggacatacttaatgactctcccttggcccttttaattaatctactgtgatctattagagagaggactgggtttgttagctaggagactaacgtaaggtcctgaatgcaagcccaaccttgattatgattaaaacagaaaaagatatacttcacaccttggtttttccatctctaaaatgggtagaattatcttccttgtgccttcttaggaggtgacacaatgatacccatgggcagcattttctttctttttaatcagtaaacgtaaacaaaaacctttgtaaggatggaagctattggaaagtaccatataaaggattaggaccgtaaatccagggaaattctaagcattctgaaagctgcttttaggcagggcagcagccaaaagaccagctggtagattgagacctttctgaaaaacctgacttcattctcttgtggttccattttcctttttttcaaatggggtctagtggcttagctgtggttattccacagctgatgcctctttcattgctgttcttctggttctgacaacaacagcattcttgcaccacttaactctccaagatgcaggcaggggaggtgactgcctcatttctgatgtgcttgttagctacaggaaaagcatcttagtattctacctttgtctaggacttgggactgggagcaggtattccgtttaagttttatgtgccatctgtatattttcaaaaacatttaacatgatctttatttcaagcttttatagccctttcaagttgctctaggggacttagcaaaacaggtagacagtaagtatggatcaactgagcacaggaaagaatgggatttgggaagatcacattgtttggattttctgctgatactaaagctggatttttactacacaggcagggagaaattactgtcctgtggtggacctggtgagagaggtggcatatgactaagcaagtcagctgacctcaattaaagggctgtgaccatctgtacaatgggaccagtacctcctccaactgttggtctcagctgagtgagattcccatgtctgaggaggtgatcaggggtgatgatgacttttgatggaactgacctcacacaggtttctgggggaaaaaacccaccaaactttattttaagaattctaaaacaattttacaattctgatttgagtagaagtttgatttgaaaagggacttcatctgcaccttctctcttgcctttgtttatagatgtcagtaatgcccgtattttaaaaagttgaaatgagttataaattatatcttaaggattttagtttgttttgaagaattgtttaattggctaggatttctccccccttcagtagcttcagatcccaatggctaggcaatatggagataatagtaaacaggattttgtaagagatgttatttatttatttatttttaaatagagataaggtcttgctatgttgcccaggccggtctcgaactcctgggctccagcaacccgctatcctcagcttcccaaaatgttgggattacaggcatgagccactaccctcagcctgagacattatttgaggaggaggtcatgaatatataattaacttaggagtacaaatgaaaagttttctcttgaacctacctttttgaacagaagaggtgatttttaggtataatggtgtgcaaagtaacaaataacagcctctaaagacatttaaaacaataaataaagcataaatatctttattcaggatgaactgagttctgaagcctgatgttttcaagagttctttattatcaggtggcttgtgaaagcccgtcgttaaccaaacgtgttgtgtttgcctcagaattttattaaaaaggtatgcataggttcatatcccccttatgtgaggtggcagtgaaacagaaacttgatagaaatattgaggaggggaaaagatgaagccaccgcggcacctggcctccctctttcacttccctttccaactctgctcctttgagatgttcttcgagaagatggaggaagcttgctgggtttagggtcatcacccaggatctggcgacgggagtgcctcaacatggggagttccctccccaaagcccagagctaattcgtcacatccagctgctgtcaggagttgagcagtcctgtcccctggctttcctgggaaggcctgggtggaggcggcaggagcaggcaagggaccaagagagtgcctgctagacctgatgcctctcccttcccccctgagcccccagggaaggagctgccttatagactcgggtacagggaggcagggaatagagggttggaatccagaaaagagggtggagggcatgactgcagttactgccattgtctcaggacagacagaccaagccctggtacagaaattgtttggctgttggccttttctcttcagatgtttacatgcaggaagtgcctttgataaagtatggtttgctaacatgagtatgatatgcatgcgcatttttggatgccaaacacataggcagatgaaactaagaagccagatgctaagatagttgttgatgaattgaaactagcctaactggctccactgttggagtcatttgctcaaactactccaaacttttgtttggtctactgaaaacattagttggaaaggtacagcgttaatttaaggcagggaagcctccagcacgtgagagtcgtgtctctctcggtgatgctgggagggaaggatgggagatgagagtcatttcacggccgcctagctcctcctcttcctctccctgccctggagctgcagcctcagctttcagagtctcttgcctggtggtaggcccggcgagcggttggattttaagtatctcagttattttcagtatcatcagtcatcactttcagagttccttttctttttcaagggtacccagtctaactgtttagctccttttcaatagccctcctcactcacttacgcctagtcaggaagattaataatgttaactgatttactatcactgcaaaaagcattagttaattagacttttacacctcagtcagatggcattagacaccctttgtgcactttaactcaaggatgttaaagacctaaatctttcagaaaaaaagaaaagaaagaaaaaggacaggcacttttccagtttaagctgcatgttggtccatgttaattaggcatttgtcctttagtctggaggtgatagaaaatgccagttactgtggtatttaactgacatcaaactcctgtccaaataattcagttgggcccagccttctctcttaattggtgggaaggaaaacttcggcacacacccagaatagggaggaaactgttacgttgaacattttgaagtttcattctgaaggatctgaaagacacttgaatattttttaaattaactatccagttgagctttttaaaaacagtaacaaaagaatctcccctcaaacttgagctaccccaaatgattagcttttgtaagtcttcagaaaatgaaagtttagtcattgtaatccaaggtcaaagtggtggttgttatccaaagctcttatagatttatgtatctgtttggccctgttttaaacagtgctctgaaaattgacagttttctagctcacactcgtatttctttattaataccagaaattcacaagtgggttaaggcacccaccagtatacacatttaaaaatcaatatatgctagcatattgggacaaaagtgacatgaatatgattgtttcatgggagcaattagatgacactttttttgttttgtttttaaaagtaacttgttcctagttgctggagaaggtaatcctccgtaataagagtatagtttaccttattcatgagttacgtaaaacaattacaaaaataatgaaaagattttttttctaacttagtaggtagccttatttgactctaaaccttactcacttttgtgtatggtttctagccaaaggttcacacatgtgagaacatttcacttttagtactgaactactttttcgtgcactgaatgaatacaatatgttaacactcctgtaaggcccagaattgcttggctgccccttgccctgcctgcctggtactggctgaaaaggtaccattgtttgttctgcaaacactgagtgatgtttgtttccaaggtgactggttctattgctgccctttaagcaaaggtgggaggggggatgggggagagagaaagttggcttcagacacctgagagcatcctgttctgggtacagtgtgtgtatgtatatgtttgtaagttgaaattttattttaactgaggtaattggagaaaaagggatagtgtagaaatgggaggaaaagacagtatcagtaagttaaaaatatcagtaggttctgatgtttaactcaatatactttgagtgaatgtaatggtaaatgttaaaattaaagatctggtttgactgaagttaactttacatttggagttaaggggagaaaaatagataactgttgaaatgttaaatttatttttgcataaaatagttctgctataacctatgtgtagctattcaaacaaataaatattcgacaatataactgaattggttattgatcaggtagttgggccttcaaaaaaaagtatgagaatatgaaatataaacagatttaagttctgtaaaaacaaaatctgtaaaatcattcaggtatatttgtgttcaaaattttccaaaaagattagattaaaagtatcttttaattggtgatatatattgactccattagactttggaaatttatattttatcagtcagaacttttagattcagactagaaaaaaaattccttcttggtcctttcccccacccaccctttttattgtacatagatgctgttaacagaactttgcctttttcattcctatcaggtttagtacagttcatgcgcaggtttcagtaaacattaactacttttatcagagcttgcagtgtgctgaatggttagcaaagagagtgtactgcaagagacagatgaaaatgagagagtccaaggtcacatggattttgaattttttttaattattgagaatttaggggaaagaccatcaggcttcacactttaaatctctttatgtgggcctgccacacggcgtctttgccagcttttgtatgtactgaagctaaaacatttgttcagatgctgattggcaaggcaagtgactttaaaacatggtttttttttctttcaattaaaaaaagttttattcagggctgccttctaggatgaaagattctcaaggccctatcaaagacgtaatgcaacacttatcgtggtgattcttaagactcctttgaattttatagggatatcctttttctcaaagatttttcaggattgccttctgataatctatttcgtttctggagttagcacagtaactcgtaaaccaagtgctaaaagatgaaatctgaaacacagatatagaataaacgtgttttggatatcatgtaatgttccccaacttttgcctatcattttcgaaaacaggaatgtgatctgtacttatttttagagaaaaggacacgaacatttgagaaattactgacaaaaattattctcctcctgcccctccgatccaataggtttgaagccgctggtcctcgccttttactccttagctggacagcgggttcgggatctgccccatgactaaggctgaagtggaaagttgcgaagatagaacaagagttgttccttagggtggtgtccctaaacttgaaagtggacttggtcctgctcgcaggtgggcttgcacgcgccaggcttcgtgtggtggctcgcgcgcgctggcccccgagcgccagcgtgggtgacccgtgccccgccccggacggccttttcaccctgttctgtttctggggaggggcgaggggaaaactgcgggtgccttccctcagaggcgggcagccattgtgcctcgggaacacggtctgagtagagttgtgttcgcacagctgaaggcggccggcggccctcccagggcctcgagggtctgtctgtgccctcctcaggctgggaccgggcagccgactgcccgcgtcagggctccacggccgcaggggccccctcgggccgcccccagggctcccgcggtgggtgtccggtgagcgggtagcgaggccatcagtcagggcggcgggcgccgattggctggcgggctggcgggggccgggcggggcggggctcggtgttcgttcgcgctggcgttcccccgtgagtagagccgcgtcttccagcggatcttgccgcactttcctcagttgcgaagggcacggccgctggggacacaacctaatgaacaaccggagctcttcagagatgcctttagcaactcagctccttaaaaataataaattcctcttagggaaagattagaagatgagtgtgcttggagcgaacccgtgcccgcccccccgccttttttggctagagggcatttagcctgtgaccacttttaaattttcacaagatttgcatagacatgagcatgcccactcgcattatgtaattatttccccaaataagtccccattgaaacatttggcttccccgatggctatttcagaataaaaacatgtagcagggtatttcatgatgggtagctccaaaaacttttgtttaaaagaaaaaccacgtatctagaaaatgctcctttaagccttttttgacgaggaggaggggtgcagacacttgcctgcggcaaagtgaacctggaaggagcggggcgtgtgtaggacagagcccaggagaacgggcagccgggtggccgggccaggaagcagggcctttctggccctttccgcagagggctggataattgcctctcctttctaaaaggagccgttttctgggccgggagcggtggccctcgcccataggctcacgctcgtaattccagcaatttgggaggcccaggcaggcggatcatctgaggtcaggagttcgagaccagcctggccaacatggtgaaaccccgtctgtactaaaaaaaatacaaaaattagctgggcgtggtggcgtgcgcctgtgatcccagctactcaggaggttgaggcaggagaatcgcttgaacttgggaggtggaggttgcagtgagccgagatcgcgccaccgcactccagcctgggcaacaagagtgaaactccgtcttaatttaaaaaaaaaaaaaaggctattttctgagaatggaggtggaggaccacacaaaacccagccagttctcgtggcttccgcttttacaccctcctccgagagccggctcccatgcccttcccagctgcgctgccctcggcaccaccgggtgcgtccccccgcaaagctggacgcccttgtgtcctcccgcctgccctcggtgtcaagtctccctccaggacgcagtttctcgatgttctgtactggaagtacatcaccggtgagggcagcaggtcactgtttggtaaccatcaggctgttccggtggctaaaggttgcctgctgccaggcgccttgctgagtgtgccctgccttagtctgagacagttcgtggggtcaggcttgacccccagcaggcccgcttcatgagctggcgcctctgcagccatgtgatgggcggagccacgtggggctagcttaccaagccagggcactgacttctgccccaaggccgggcagggaggaccccagcaccggccactctaggaccctagaatgagttcagtgactttacgtggcaccccctctttccactttgagacttacctcacttttgctgcaccacctttggtggtcgcttttctcttaatagtgattcttcattcttcatggggggataacttttctcttctacacatgctgggacccctctccaggaggttctggtggagcatgaaccagtggctggggcattggaagcttcccaggcgatgcaaatacaaagccctaataaagctttcaaaactgcgttagaaacaggtcacttttacatttgtgttggaaacttgtcttgagacaaatgaatacatttgagccactgggatttttggggaaaatacagctaaaagggttaggaaatgatacataaggaaattctcccatctgatgctggctggcttgcttgcttgctgcaaacccgagtgttttctattaagtgaggcattgtggttcctatgctagccctgatgggccttcagcactggcaggtgtaaatgcggctcattaattttttaagaagttggaactctgacagttttcagggatgctgagtagctggtaccagatgtttcttttgttaagggcatggagaggcagtgtcacaggtaatcaggctatggtcgttcactcccttggtctgagactatgcgttttgtggtgctgaatgttttcttaaaccaagaagggtgtggggaggtgcatgttctggtttctagttgggctttcccccgacactggctcttgcagtattatcttaggtagaggtgttgactcaattatcattagacccagctcctgttggaagagagtaaatggtgcttggggcctctttatctagaccgttttgccaccgctgaagtgacagcctgtgcttctaactgaattcagtccttttttttcactccctttctgtggaacaacagcaaagtcggctgctcatcattcgggtgcagactttacagcctctgaacagcctctgcttttgcagtttatgaatgcaccatttgttgttttgagcacaactgttagatacaactggcctctgcagcccactctgccggcgaccagtgtgcatcactgcagcctttttttctttctttttttttttttttttttgcataggccaaatttttgctttaaataccaccattttgtccacactagaatttctttgacccaacttacattttttcaaatgtaagtttcagaaataaggttttaatttgctcaaactgttggtctagggatcctgaataagtgcaagtattttactttattaaagggggaattgtttttgtggcttggttttgcacacttttttttttatattctcaaacatgtgacttccaaattttcctttaaattgggttgaagttagaaagttttattatttcctaagtcattatattttttctttttgagctttatgcacaaataatgttttcagtttagaacttaagatcttaaatgttctcataacaaaaaataaatatatgaggttatagatatgttagcttgatttaaccatttcacaatgtatacatgtatcaaaacctcacctgtacactgtacatatacaattttaatttgtcaactatattataatgtgaaacttaatttttaaaactgaatttaagggaaactgtcaaaaccaaactttacaatgtggtattgaagagtatttataagtaactgtttaatttctcattcttctgctcttgaaacatggtcttatccaaaggtgatagcattaatgttaggattttcacttctgttttgtttttctcacatagacattctttggccctgtgtaattatataggtgctgtgttctctggttgtatacattgacattattccttttttttttttcacaaattatttctatttctttgtattttagttaatgaagtatattttaatctttttctactgtgctttacatattcaacaactggttcaaattgtcagttctaactgcttttaggccttgcttctcccaaggagatacatttctgttaaggcagcagtaaacatcttacagcaaccaactctatgtgccttggtatcctggagcttccaaaaatgaaacagtcacttgttgaaaatgaagaagctttctgtagttgaattttgaagtagatatatttatttgttgtccttcagcgaggttatgaaggccctgggttacatctgcattttttataaaattgcgacatacaaacatagttaaggggggaaagtgtaatcttttgtgagagtcatgctttcttcttcgtctcaccgtgtagaggggaagatctgtctttttatgattaaaaaagacacccattctttccactacctgaagaatcttgaaggtccatgtgaagacaaagcagccataaacaacaagttagagggaaaacgagcttgtgtgttagtgcttccaagagcagttttctcagctctgatctgttgtaattttcagagcaggtttacatgtgtggtcgcatgttttggtggttggttttgacctggacctttcaactgagcaaagtctccttggacttttctccttttcccatagtttcttgctggcttctacctgtgattagtatgtgtgttgcttaaaatggcaactgaaacatcaccaggaattttcaccaggtagaaactgcttttcctgtatcaaaacaaccagtacagcttagctgatgcttctgttgctaagcaggtaaatttctggtcttcaggctgcccttattaaccctgtaaatgcctaatgtcaaccgaagaagaagaagaaaagaacttgatgcttccttctcaccttagtgctttgttcaagtgcgtgaaaactggacctagctcagcctaatttccatgtatctattttagaggacctaacctcgattaacctattttgcagggtcaggaggagaattgggagatggagagggcctgtgaggttggtagtttccagtgaaatgtcagccccagtagctgatagtggaagtcttatactagatgaccaaaattatgggtttatttcagccagtaatgggccccgtctttttctttgggacttttctctgcctgtagctgcccctatgcctgtggggagaagaagagggaagaaaggggttgctgtttgcatctatttgccagaaaggagttaacagaacataccgcagaacaggttgggcaagactgttaaagccagtgccttcctctctctttctctctctctctttccctaccccctacgccacctctccgtatccctctccttcctgctctgcgcaccgtctccccaccgccccccaggactttaatacatcttcagactatactccccccaccaacacacacacacagatacacacacacacttcagtatctggctttccttctaggcagaacatggatgtgaataaaacactttgtggagcctgttgtgtgagaagcaggcagcggctgtgggcctcagccttgccatctgtttctagagcagtctgtggcccgcttaccatgccctctgtcatgtaacataggccccattcagcagcagcattcttgaatgtgcatttatgtctctgtgggaccgggggtagatggcctgagagggggaaagcaggagatgggaggggaggaggcgaggtggggacggagaaggaagtgtgtgcacacgcagacagcctgggagggcagtgaggtggagtcactgcaactcggtgccagcaagtcaggagacattactgctggaagtatccacagttagctctgacttaggggacgtcttgtggccataaatgtggaggaaccgagctctttaaaagccagtttgggtctgatataagttctgcttcgtgtttgtgtccattcactccgtaaacataccatatatagtcatgtttgagctcactataacacacattgcaagggagccgctcatagtgcacacatcctttggctgttagaagcagactcacataggctatttctggtgtgtcgtggctttcttctttctttttttttttttggtggggaggaggtggtgggggagggagaggaaaaggagctctttttccttccatcttcacactggttggaagatgtttctgattctagtttgtctggcactctgaaagctaaggaactgtattgtcatggcagaagaaacaattctctgtgtgcatctgttttagaatgaaaccgtacttttcttagtatcttaacatcacatgcattttgtagtttatggtctccagtctccagctgtttttggagcaccttctaactttgagagggtgagctctagcctgtaaaatggactgtgggtggctcgtggagaaggtgccctggtgtgcttttctgtgtcctctctggattctccctgagctgtccacctctgaagcctgcttcaccttcagactgccagggcaagacatgcagcttctgcagaactcatggcagccgttttccacttggccgagctgggtctgtgaagcagagaggaatcagtaataggaaagaaatgtagttgtttttttcccccttagaatacctaccatactgcatttcagcttggagtgcgcagcatgaggcatttgtggttcagaaaagaggtcttcctttttcctcctcctgttttcttttccttccttctccccaactccccaaaggcttactgcctttcttctcaggccacgtgtgtagataacctttgaggaaaagatggtttccgtgctgggatatttggatattacctaaagggacaagatgagccctttctttgccttgttttctttctctggcctcatcagagtgaattatatctgactgtgtgacagttaattgtaccatccatcccgtgtcctaagctgataagcccctctctgtctgcctccatcaagcttctttgtttgagaagttcctaatgcagtaggagaacaaagtgacagttttcttatttactgaagtctctaaagcacattcataatgctcttcattgtatctttcttataacttcattccttcaacttaggtaattaaattgttccatagtaccagtgattgataagttaaaacttcctcagaaacatcagtgagttcaggaaaaaaaaaaaaaagtttgtgttttaagctgcgtgtattcattccaaactattattggcttggtagacagtattcacagtaagacactggacactgctggattgccaattaccattgtggatatagcagttgattagctagctgactcaaaagtagtatattgcttatgtagaggtcgcttatttggcattcttcggtccagaatattcagccgatgtgcttgcgagtgagtgagagccagcagggtatacgtggggggagaggtatgtaaaataaagttttcaaagccacaaaggtgttaggaagtcctggtactaacactcctaccttgattcccattgatcctttaggcctgcacttcagcactatttattcttactgtagatacagccctggccaccttgtctcacattttccagtctacatttctgaggccaatgttggggatggaaaaaagccatcagaaggagacacattgacaacaagcagaaaagatgttaggggatgagacaagaattcaaacggcatggcggattcccattgggggaatttcacagactggacagaggagccctctgtgttatttcttaaaactgcctgtgtatccacaattatctcaggaaaattttcaattgagaaaaacaagcatggccaacagagccatgtggtacagtggcaaaagtaaagtgggggggggtgggtatgtcactagtttccagaggcagcctagtgtaagttgttcatcgtgatgatcctgagtcacccccacaaaaggctgaattaatcatacattgattcaccatgctatgcttaaggaaacagggaagtttgaaagatactttagaatgattgacacccaggagttttatatggaaaattaatttctgaatactttccttccccctcagtgatgtgcagctgcttcatgagttaacatgacgtgttagaataaacctttcagtatagtcagacatatactaaaatattatatattttgcccagatttgtagaaaaaaagttattcattaacagattcagatgatgtccaaataccataccaggttgtctgtattccctttattttttgagacagagtcttgctctgttgcccagaatggagtgcaatggcatgatttcggctcactgcaacctctgcctcccaggttcaagcaattctcctgtctcagcctcccgagtagctgggactagaggcgcgtgctaccacacccagctaatttttgtatttttagtagagtcggggtttcaccatattggtcaggctggtctcaaactcctgacctcaggtgatctgcccgccttggcctcccaaagtgctggaattacagttgtgagccaccacgcctggccatttgtctgtattcctaatgtgaattgtgcatatttatcaccaaaagaatatataaaatgtcatggatttttaaaagcaaatgataccaaagatccctaggtaccagagaagtcatagacatcctggaaaacatagtctctgtagaaaaggaatactgaacttaaaggaagtctcaagttaaatttaaaccatcaaatggtgaattggaaggaaggagtgccctcaactaagacttactgtaaaaaaccatagaattttagagctggaatggacttgagaggtgacttgttctgtttttatgagtttgtcttcattttacccagtgttcttccacaattcatgtctgtgcccagaattgaacaactcacctggaatagtgtccacatggctttttggccatgaggaataatcctaacttggaaaataataggtatttactcagcagaaattattaggttttgggttttgtttgttttttgttgagacagagtttcgctctggtcgcctaggctggagtccagtggcgcaatctcggctcactgcaacctggcgcctcccaggttcaagcgattctcctgcctcagcctcctgagtagctgggattacaggtgtgcaccaccacgcctggctaatttttgtatttttagtagagacggggtttcaccatgttggccaggctggtctcaaactcctgacctcaggtgatccacacacctcggcctcccaaagtgctgggattataggcgtgggccactgcgcctggcctggttggtttttttttttttttattcttttttcaaggttatttgctaattttattcttctcagtagttccattttataggtagagaacacttcagcactccatggtgctataccagactctttcttggccttgttatatattaatggacattttcatggaaatcccagggttgaaaactccccagagttgctaatacctgctactggttctcaagtggtttgatattatatacataagtgtggagcattgctggacccaggttttaataatcagattaatagatacatttgaaacattgtcatattagcttttaatactactgaatttaagtcttctgtgcacttaggtttgctgtaacgcatggttaacatatataggttggtataaatttttctgttcctgattcagatagggtttttgtgtgttttgggttttttctccataagagaaattgttccctttgaaattttaattagttttgaaattaaactatagttgtgcatatgcatggcagctatacctcctgattgctatgctgaaggtagaaagtattctcttgttgtatagacattggtcatactgtcaggcaagggaaatgccactaatttctgtttcttgaattgcataccagaaataggaattcgttgtctgactgttagatgctcagggcagatggaaaagtaagaaaaaccaggacttcccaggaagcaagtggcagatctgtgtgctgactgtttcagggtggggatggcacagagggggcttgcaggagagatgtggccgagggtggaagagcttgtcttcggtgccttgtgataagcgacctgcagcctgttgcaatggcgactgcatttgagatggtgtgcttgtaacatccgccgggtaggcggagcctcaaggacacatgttgagaggttggggtggtggagccaggaggtgcagtgagcgaagcatccaggcgtggatttgaacagctgctggccgcccggagatcagcctccatgcatcagtcataggcacagagaactcatccgtgcggctggaggctgaacatggagaaggagggaagggagctgctttttcagttaatactcttgatgcttccagagcagtttaaagatactgcggaaatttgttgggtggttcattgtttgttttaaaagctttgcccccttcacgtaatcctatcttttatttaatataaatgcaatcagtctgctttaaacactgactaaaattgcttttactagatattgtattatgtataaggggggagctgaggcccaaagagaagaatttgatcaattgatttaaggttgttggaggattgaaatgttacttgattgctggtcttatccaggatttcaagatttcaaggaaaagtggacaatgcctgcttttatctaagggatttcagcagtcatatgatctacaaaccagcccccaggagcagcaggccctggcaacctctgtgctatggagtccacgcagaacagggacttcaaagtgcttggggtgtgctggcttgggagtcatttcgctgagaactggttttggtcatggccttaacatctgcatagatgttgcacattgcaggcacatgacacttgaatgggctgagatttaggtgcaagttggtagagcttaaaggggaggtaacattagtgaggccaatgggcagcagccccactgctgagcacacactgcagttccctgcagggtcagggagaaggtggccttgccaggttgaggctaggagcagagatcatcttgttaagttctcacaaatcaattactgacacgggaacagtgtgtaaaagtctgaaaccacaaatctttttggacattttggctgtataaagcatatcatttataagctcccaggaatttacttatagtttgagtgtctcttgtgatgaacaggactatgggggagaaataaaccaagcaagtgaaatcacagaaactatgtgaaatcacttttagatggctttcgttttcaaaacgttggatattctcactatatttcccttgtaggtacatacacaaggacattgatttgaggatgcattatgagttttagaaaatcaccttgctaaataatagggagttctggggctttatgggagagtgatagtaagatgtgatgctgagttttttagctgtgtgtataagtccacttggtatctaattgcacattattcctgttgtttccagtatcctaagggaacctctctcagtgttagctccttatgaaaagtacagaaataatcctgttttagggtgtacatgatgactttcttggtctctctaatttcttataagtggtgtattacatgattttaaaaatagaccttcactaatgttagatctttaggttttcattattgttaattgactttttttatgtctcctgaaagacagaaatgaagaaaataatccactcaccaaaaaacccaacagttgctgaatagctatgaaacatatgaaagaaattcagcctttagcattggggcctttttattattctcaagtttgattttacagctgagctataaatgtgaccaaatgcatcacatgagtgtttaccttttttttcctttcctttttggccacatggaagtacctaaagagatggaatgtgacacacccagagaatgaggcactggaggggcctatgaacttgagaaggccaggagcagcagggtcccttcatctcagtgcttagctttgccagtgctaagtgggaagcagaagtcactgagctccttagcaagtgagtttttaaaatgtgtgtgtgtacacaaaggagttgttccagtgctctctgtagaaagtgctagagagaattctagcaggaaattccaccacctttgagattagttgtcaatcccactaaaagatagccctccaaagaagtgctgctttgctctgcagacctgaaaggtcctatgcgattctcttacatacttcttagttccctctccccaattcttttaattttgtgtatttcatgaattttgtagtcttaagttgttaattgaggtgttctggattgtaatgtgttttggtgtgtgtgtgtgacagtgaaggaggtattaatctttgtgagagggtttttttttttttttttttttgaggaaaatatttttaatgtttcattccacagtctggtaagttgtatactgttgacagctcattacctacatgttaaactgcaaaatgttcctagattagtagaactattatttttttttaaaaaaagtagctttgtggttaaattctgatgcccttaaagagatcactttctcctgttttggcaaaacaagttatcagtccacacgtgattacataaataaaattgaaaccctttactcttgctcctccctactcaattaaagtcaagggattccagtagtggtatacacacacacacacacacacacacacacacaaatcctccaatgtatttacttttcacatttttaatacattttagcggactgagctttctaaattattagcaactagtacataatcatgttgcagtaaataatttttttagttagtgagaaacagaccgaaaataggaggttaaaaacagttcatctgttttggtgaatagaagtgaatgagagtagggtagaaattctggctgattttataaaatatctcagatctgtttgataggttgggcttaagactgatgatgtgggcatcctctttataatgaagtcaggctaagcgaagctatgttgaagtatcaaacaaagcctgaaatcccagtggctcaacccataaagtgccgttgcttgttggtgtagaatcctctgcaggtctggcagctctctagtatagctcccttacaagtggtaacccagggatccaggctgctcttgtcttatagctactctgtcattacacatgcttccaggttgccaccacaaggaaagagctagtgggttacatactgactttgaaaggctgcagtctggaagtgatggctggtacttgtgctcacagctcattggccaggactagtcatgtgacctgcctgaccacaaaggtatacggttgccaggaaatatggaagaatatgtggatattctttgagcagtgagcatctttgctttattctccttttccatttcatctccataaggttctctatgcacataaactagatgaagcttaggcctgaagcctagaacataatgacactttggttctcaaagtgtggtccccagacaagcagcattagcatcacctgggaacttgttagaaacacagattcctaggccccactccagccctgctgaatcagaaatgtggaggtggggcccagaaatctgttatcataagctctccaggtgcatactaaagtttgaaaatgactgcccagtgggagtacaatgtttgtagcacctgttgaactcatcactggggacgtgaaggactaatagacacttgctaatgtgaacgtacagtatgtgtgctcaggtgtgagcatgtatatgataataaaaagcactgagggatggtatcatgtgtgccagacaggttttagcactttatagatttgactaatctatttctcagaacagtcatatgatttcagtattattattgtctccatctcacagatgaggaaattgcagaactgagaggttccctaactgtctaagggtcaggccacttaccactgctggcaagtggtagaggcaggatttgcgatgtggttccagagcctactccttaactaccatgcaattccgcttgttcatctttgggtggttacccaccgggccttaaggtagtcttttcattttttcttgaatggagacagtctgtcagagttcgcaggaagtgtggtgtgctggtgacagttcacattccaagttaagcccccttaccacgagcttcattcgttggtggtttacgtgtggggggtgctggtgacagtgttggtcaatactagaggggcatggctaggcagcagctgcccagtcatttaaaactgaacaataaatagaacggggttgttaggggcggaacgaaggggcctagtgggaagtggtttctcagagggagatagttcagtcgcactagaagaatattttcttcagttaacctatgtgtaattttcaggcttatgagaagaaaggccctgttctcatcaccctcccttttgattcttctttggtctttttccatcatccatctgcctgccctgagatgctcatctgaggcctgattccatcaggtggtctgaagaaggtttctatgaagtctttatgagctggacttcagttttgttttgtttgtttgtttgtctgagacagagctttgctctgttgcccaggctggagtgcagtggcacgatcttggctcactgcaacttccgtctcccgggtttaagcgattctcctgcctcactcagcctcccgagtggctgggattataggcctgtgccaccacacccagctaattttcatatttttggtagagacagggtttcaccctgttggcctggctagtctcgaactcctgacctcaggtgattggcctgcctcagcctcccaaggtgctgggattacaggcgtgagccacagcatccggccaggacttaagttttaatagagaaaatgtgttttcccttccaagaaacctgataaaatagtttcctccccttgcacttgggaaatccagatagagttagatgtgatttaatcttttgaattttgaactgattgaaaaggattttccaagtgacattaagaacttgcatccttttaaattttttaattattaactgcattttctttcttccaggtgggtctattatttgttgttgtttaggtgtcctttgctggcccatgtattcccttggcttctttgtcttttgtgttcagcagactagaactgagacagctccttggcagctctgtcctggacagtaccggctttaactctaggtagaagataaagatagcatcacccctttcgggtttcatgttggctgggaacagctgctaagctttgtataactcacaaagtaacatttcattccagatttgctgaaatttttagttttctgcaagccagggcttaaccacggggttttttctcattcacacttaagagtctagacttttcgtttgagaagcagttgcttgtcttggagtttagtaattgaagggaacagaggtgggagagggaggaaattatttgcataagttgttttaaagctccgtccacttcctttcccttcatcactttaaatggtttaatttgcttaggtacttcagcagaggtgtagataattgaggtaaatctcgagtcaaatctaaacaaaagaaagaactgacctaaaaaagagcaactgaactcacactaattgaatcacagatttgctcagaccaatctaacctgtgaggaaggccagggaacactgtgcccttgatgtgctttttgcctcttaagagggaacaccagccagtcccttgtggctctcccagccaccttccgcactgagccacatctgggttagagctgcaaaattcaccctgaaaaaaatgtgaaagccattttgggttggacatttgtaaaacaaattttttctccttttggagacctggtgcccttggtatttgtatatagaatccacttgtttattcttgaggagagcagctatgtgtgtgaattgggcatccgttggaagaaacataacaggcttgcctgtaacagctggaatatagttgcagccctttgaaataagacaatcttagttttccttccttctccttagccagccatccagcgtaggaaacaggatgctgtgtacgtaccctgagtaggaggagagggttccagagtgccacttggctgctcctgtgtacccattcttgttcaagagcaccttgagatcacatggtcttaaatgccaaagctgaccaagagctgcccctctgttcagcttcgtcgtccctggctgttggggaggactttgtctgtctgactgccgctgggctgccttgccccagctccctggggtcctttgctccgtaatccatcagctcttcttttctcttcttcttactcatagtataagacccgactgcccattttttggagatgactaattaattagtaaaatatttggctgggcgcggtggctcacgtctgaaatcccagcactttgggatgcagaggcaggcagatggcttgagttcaggaagttggagaccagcctaggcaacatggtgaaaccctgtctctaccaaaaatacaaaaacttagccaggtgtggtggggcgtgcctgtagtcccagccacttaggaggctgaggcacaagaattgcttgaacccgggaggtggaggttgtagtgagccaagatcgtgcagctgcactccagcctgggcaacagagtaagactccatctcaaaaaaaaaaaaaattgagtgcctactgtgtgcacatgtaccctgtgtgaccatgggccaggcacagtggttcatgcctgtaatcccagcactttgagaggctgaagcaggtggattgctcgagcccaggagttcgagaccagcctgggcaacatagtgagactccgtctctccaaaaaaaaaataaagttagcatggtgtggtggtgcgcacctgtggtcccagcatttgagaagctgaggtcggagggttgcttgatcctggaaagtcagggctgcagtgagccatactccaacctgggtgacagagcaagactctgtctgtctctttgggaaaaaaaaaaaatccaacttacgagttctcttgtgctccctctccactgttcctctttgctctttcatccctcctgactccagaagagggctctaccactcgctgctaatgccttcacatttgtctggattcctgcctcctggggacctcatccttgccagcccctgttgctgtgcctgtgccctaccaggggtgttttcatgttctcatcagtgaccctgcttagccctgaatatcatcagccggctcatgcctgacttctctgtggagggattcatcccacgtgcattcttcagggtatgaatcccacaggaccaagaccttctggatccctttccatttcttcacattcaagaatctctgcaaaagaatgtagcctaacccccctaacaatctaaaacttcttcccaagcaccatttagtgccccaggacacttgcctgtggccagagcgactctcttcctttctgccctttccattgtctaccccacctgcctcccctttgaaagttgttcaggtttaactttccctccctattccctttgttcccgtttgtaggcaggtctccctcccctgcaatcccataccatgttcaaacaggttttcttaaaactcttacatcacttttctcagcctacaccccctactgccccagacccaaccccaactctcccacctcctgtaatttgcccactccacacacaccctctgtaatgaggcccctgcccttcagcaggacctggctcctgggcttcttgtggtacttcctgggtatcagctccctccagcctccacctccatacccttcctcttacactaccccagtccactaatctctgctttttctagacctaaaattagaattgtatagacagcacttaattctcttaccttcccaagctttcttttacctcttaccaagtggtaagcttatggagttccccaccccaacctagtagtggatcaggagttactaattgaagtagctgacatacatttttatcatcaagaaatatttgagggcctaaagtagagtatttcacccccaaatcatttgaaggtagattgtgggtcccatttgtttatttttttcagactcttttttttttaaaccttgatagcttaaaggccaggaaaaaactgattagttttcatcttcaaaggacacaggataaaagaaggactgagccagctcacccctaccctccaaacacctttaaatcacagtcacttttcccactcccctggttgtgacttttgaattttatagttgatataatccctccttttatagccgatttatgcactgcaatttaagtaagcagaaatgttcagtgcatagggggactcagatttaatgattgttgacttaaatttaaaaggatcactaaggcccctgtacctcttacttattgcaaaacaaacattctccgtaagaccaccctctattctgtgacccctttgaggttcctaggaattgataggttgtgggccatgtttacacccacaggaggacttctttacagaaaacctccccagcatctttgatggcctagatgtgttcacagtcacactgagaaagttttaacctgatagtcatcattcagaaactaactcgaatcccaacatcattcctggaataacgggacagccgcatagatggggctcacaaggatgtctcccctctcgttcctttccagaggatgagttctgttttaaaattataactgtttattacaggcactgggcggattgctttaggaattgatttaacgaatgttcactgggttattgccttgtgtcaataatgttttgagtgaaatatcaaaacgctgatgagatggtttatctcatctcatctttacaagaaaagggaaggttagaggatttggtgttgccagtgtttttacttattgttggtggcctgcctgaaactgatggcagtagtaagtaaggaaaaagcctgccagtctccttaactctccaaaagtaggattaaatctgctgagggtcagaccactgccgtagttctgtcctttcctggaaatcatagattcttttgaaaggctgatcaaatttatggactattttcctaaagctgaatactgtctgcattttacatgtggtttcaagggtatgactcttgcacttgtctacagaacaaggcttatcaacctaagcatgtcatctgttcagctcagctggcccatagttggcttgcagtacctgttatagattgagagaaacaatgcctactgtgtgccaggcactgagctacagactaaagatacataaattgggggagggagggcagggtgcaattaaggactgaaatttgatcactttcttttttgcattttttttttttaaatgagacaggttttccctctgccacccaggctacttgagttcagtggtacaattatagctcactaccaagcccagcaaattaaaaaaaatttttagacacaggggtcttgctatattgcccaagctggtctcaaactcctggcgtcacgaatagttgggtctttctggtatattttcaaaaattatgttaagtttttttaaaaaaaaatagtgacatcaaattatacttaaaaaagcactgtattctcatgatacatacgttgtttcagattgccttttctagactttatccataagtatagcatagaatcttaaatgtgccagctagctttttaaacttgacctaactttataaacattttcccatgttttcacacattgacttttttttgagacagggtctcagtttgtcacccaggctggaatgcagtggtgtgatcaccgctcactgcagccttgacctcctgagctcaaacaatcctcccggttcagcttcctgagtagctgggattacaggcgcacaacaccacacctggataactttttttttttcttttttttttctttttgagacggagtctcattctgtcaccaggctgaagtactgtggtgcaatctcagctcactgcaacctccgactccctggttcaagcaattctcctgcctcagcctcctgagtagctgggattacaggcacgcgccaccatgcccagctaatttttgtattttagtagagatggagtttcactttgttggccaggatggtctccatctcctgacctcgtgatccacccgcctcagccttccaaagtgctgggattacaggcgtgagccactgcacccggcccacatctgggtaactttttgtgttttttgtctagatagagtttcgccatgttgcccaggctgatctcgaactctagggccaaaccgatcctctcgcctcggccttgcaaagtgctgggattacaggtgtgaggcacagtgtccagcccacattgacctttatgtttgaggtgggaccaggttcaagcaggtttagggtagatggggcagggtggggatgactcacctgggagaggtcagcctgcttatgacacgtccctctattgttggtttcatggattatttccctctatgaactgaaactctagtcaacactaggcaaagtaagttactttgagatccactaactcccctcccaagcctgcaggtaaaaccatcccagatcacctttattcctgctttagggtttaaaaaccccaggaggcaaacaaattaaagactgcagatgttcttaggatggttagacttgacacagaagagaaagaggtacaactgttcatagagttcagtttgacaattaacatgtatattagtatggttgcctgtgtttgtgttatgtttcactgtgtttcatcttcctgtgcctgggatcccccatgccctcctttcctatctttctcaaaaccagctgtttttccccatctgctgcattttggttatagatatttatttgtaggtttgctttaaaacaaaactcctctaaatcctacttgataaccatccatgctctttactctctcctgtcctgggagctctcttcctaactcctgcccttcattctcgacgcctgcctggcctccttttggttccttctctacagcattgcttccacccaccagctgtagtgcccctgtcccttaagagtatggcagtgcctcctaactgggttatatacctctgattgtccatttttaaatctgctaccaagagctttttaagctgtggatacgattatttcatcgtgggctttaaaaattgtgaggaggggcccttcagtgggtttccagagcaacaggataaagttcatggctcttagatggaaccttgagcccagcatcattctgccagccgcatctttgccatttcccccactgcactctccctcctttctcaaaacacactggtgcactctgatagctcccaggggttttgttttcatggacaagacacacaaaacttttgcagttagacacaaggttgccgtttttttattttgctaagtaagggcattaaaaaatgatctctaccatctactgtctttatctcattttaaaagatggcagtttaccctaaaaaaaaaaaagaatgaattcagcattgtgagaaactcagcaaatcatctgctttttctgcacactgtgttaacagctttctgcgtgtggctgggaggcgaatctcttcttcaagctcaggtttgcttttgctgtgctgccctcgccttgcactcagtggtgcttacctctggtgagccactgcagctctggaagtgtttggctcatactccaggttccctggagttgaaatttccctctctgtgtttcctctgacataggaagccagggctctctgtcttacagctcttggtggttctggcacctggaatgttagtagccttagatgtctgaggatgatcgtcataatctcccaggttttcgcacagatcccaaaccttaccctatgtgtagggtatacaaacagtatagaatattttaagccactaattttaacaacatgctgagaatacccatttttctctgcctacggattggatacactctgaaagcagcaaggatgggcctacaactccagctgcaggaaactgagtagactgctcccctttattttattttattttatttttatttttttattttttcattttttgagagagggtctcactctgttgcctaggctagagtgcagtgtcacggtcagtgctcactgtagcctcaacctccctgggctcaggcgatcctcccacctcagcttcctgagtagctgggactacaggtacccaccaccacacttgcatatctatcttccaaactctcatccattaaaagtgaatcttgactagtagggtaagagaaagccatcaccataattagcagtgtcttttggaggaagccttgaaaggactattcttcccttgatgagagcagagcgttaaagtttaactacaaggaataaagagacagtgagttttttctcacatatttaccgtggccaggtagccatttgtataatctgttgagccttttttttaccccttaggaaaattctgtttgcagattgggagcactccaggaagtcactggcctctgaaatacttcgtggaaatgtgttagttcccattctaaattggtttggtgactgaggctgttctttgacttcagcgttttattttattttatttatttatttattgagaaagagtcttgctctgttgcccaggctggagtgcaatggtgctatcttggctcactgcaagctctacctcctgggttcacaccattctcctgcctcagcctcctgagtagctgggactacaggcacccgccaccacgcccggctaatttttttttgtatttttagtagagatggggtttcaccgtgttagccaggatggtctcgatctcctgacctcatgatctgcccgcctcggcctcccaaagtgctgggattacaggcgtgagccaccgcgcctggcacttcagcgttttagttgtggggctggcagagcatgaaattgagtttgtgtgagcacgtgtgtgcctgggtatagtggactgcattttctttgcagaagtataatgaagcatcttcaaggactttgaaaaagtttcctcggacatatccagtgagcatgatagatgccattgtttcgcaagttttctattttctttgtctgtacaggttgttcctgacttcgtggctgggaggaaattgaggatgctgaagagtacttgccgtttggccggtggggttgagccagtcagctggctcctgttctcccatgggcccctatcggggctgggtcctgtggctgtaggagaggggccacatagaggcaccgttctaagttctgtggggggacagcacagttcctctggtcgccacacatgccctgtctgactcatctattatctagactcataaaaaaaaagatcctaaaaaatactggctccattctggagagttggcgcagaaattcagattgtggactcattctgtaagctggcttctgttcctcacctcccacccttttcgccatggccttccctacctactatcatcaatccccactgcccatctcctttcccccacccggttctcttacctgtgtgactgttaggggttcagtggtaggtatttgggcaaggaaatttctcctttccttaattgattttaggaagatcttttgtatcccagaaaggaactccagggggactgtggtaaatgtctgatttaatcattttctgaatgcattaacctcacatatgctgatgggatgccaagaaaatggaactcctacccttgtatggcagggagtcaggaactctgtccactggtgtgtgagttccctcaggtcatcccatcccataagtgacaagcacagtctcacaaccctcttgattgatgcacaaaagagtggattttgctgctatactgagtcctggatattcacagcaaagctctaagtgccaggcagatggaagtgcttttgagtctgaacctaaaaacacctagacatccccacagagtcaaatctcaggcacagagttaggattgggaggaaaatcaaagaccacgacctggcctcgctccaaaggcgaggggtccagtgtattccaggccatttgcttgtgcaaggacatggtgttctgctttcagttccagtggttaaaggacgctattaaatgctactgaattattttaagaatagtagtgtaaactacatttaacttgagctactgtaactaacttctcgggtttctggactttgatgaagatagctcttgtgtttgcagcagacagaaagcaaatgtctaagtgagccctgaaagtaagttctcttctcggaagcattggcctctcacacacagaggcacaaggagtgctatccgttggacttgaaggctgttagagttggagctgcaatggatgccgggtaggtgttgcttgggcattgttccaagaggctctggaggcaaatattttaaacaagtcaaacagcccctctaggcgagctgcaggaagtccagcccttgccttcgtgtggtcagcaggagataaaagtgtggactgttggaggctaggcccctcctaacactggataacaaactgttaagggaagataaaaggaaagagtagggatgtcctttttaaacaacatgaaggtgcctttgtcacatgcattcaagtaaattacgggtggtgagcaagacatgcctcatttttatgatcacaagcgtgttgaagaattctgagaagcaggacttggtttcaaaagtatgccaaaacaatttcatgtcatgaaaatactggtagaggtaggcttttgattgagaatgttcccattacatactgggttacattaaataggcatcagcttggatttacaaatctgtgtgctacagagattttccctgttaaggtgtgtctgacccatggggactgggtgggcgtgtccagctgcccttggactgggcagatgagcaggcagggcggctgtgcttctctgaagtgtgcgcatctcctcttagttgtgcttctggtgttgacccaattattgcccgggtatgaaagagtttgaaggaagagactgtcctgctggtgtctatctccccttttcagttttccttcctgttctttgtaacatttggggggagtttgggggcttgcaaaggggttatctgtttctcagggtggggcttgtaaacatgaacccacacttaagagcctgggcatgttcagtgccctgtgtgagctcaatccaaagcaagtgaacaagtgtgcttcagggacatgatgcttgtttcaggccccgctgggccgtggaggggcggtggccctttgtgcagttagaccccccagggagtgcagttgtgaactaatcaccgcctggagagcctgtgtgcctcacacttcctccaggactgcactaatccccactcccacccccaactgccagcccctggccttggccccctccttccaaggtgcctctgctggtccaggaacatgccacctcctctcccagctgcacatgggctttccaaaaaggcccatcctgcctgctagtcatttttggtttgctcagtttactttaagaaaacccatttgcttgccagtgtttttggttggctagcttgtgataaacacttatcaaccacttatatctcagagcatttgttttccttcatatgcacagtagtaaatacttttcttagaggcgaatttgggggtgaggggatgggaggttttctgttgtatggcggagggcagcccatgcagctcctgggagctgggcgtggtcacttcaccgcacacagtcattcccagctgacggtttgtaacgtctgattacgcactgtgaaattttgaccacagctgaccacttttccaatgggcgaggaaagatgtgatctcctccttccactgccttctctaagctaagctgttaggggagaagcatttcaaacgcttgtatcttccacaagtcattttggttttctaaggagtgtcatcctgaattctgggaattcgaagcccagatttaaggtaaatcacctgccctgggattgcttagcttgcagctcgtccctggggcaaagtggagaatcccgttgctgctgcaccctttccctgagcatgtcagaaaggccagcccggcgacctcagggcctgtgaaagagttgcaggatattgcctaaaactctatgcaaactgctactgaactttaccctagcttcttaccagaagctggaaatgtgaccgaagatacttagattcacttcagagatgtgtcccagaacactcccatttctaccatacattgtcatggtgtcagccatgctgtattcaggtgctgcagttagttgggagagaagcagcttggtgaatatagggaagaaagagctgcatccctgtggcagccagtagtgtgtacttccgtaattaaccaaacgtgaagctgaccaggattggtttcagcagcaactgaagtcagaggggtttttatttcctggtcgccagatagcatggcgactgtgtcagcagctgttctcattggccaggggattgcatttgggaaaagccaaattatatttattttaaattgtccaacttgtgggctgggacaggatttttttttttttttttttttgagatggagttttgctcttgttgcccgggctggagtgcaatggcactatcttggttcactgcaacctctgcctcctgggttcaagcaattctcctgcctcagcctcctgagtagctgggattacaggtacccgccaccacgcccagctaattttttgtatttttagtagagatggggtttcactatgttggccaggctggtctcgaactcctgacctcaggcagtctacccgcctcaggcgtgagccaccgctcccggccggggacaggaatttttttagaagaccatcaaggtgagctcctgccttcaaggttttggcaatccaataggggaagcagatgggtgaattgaggagttaggagaatcatcccagggactacctggaatgttggaggataaatagtgtagcatcagtagctcgcatgctggaggatgccacaatgtttgtaaagtattttaacaagcactcctttgaacctatattgtaaggtaaggagggcagtgttatcagcttcatttttcagctaggagaactgaggctcagagttcggtggctccattgatggcaagctggatttccaggccaaaatttaagactccccatgtcaggctgggcacggtggttcacgcctgtaatcccaacactttgtgaggccgaggtgggaggatcacttgaggtcaggagtttgagaccagcctgttcaacaaaactccatctttactaaaaatacaaatttagccgggtgtggtgatgcatgcctgtaatcccagctactcgggaggctgaggcaggagaatcacttgaacccaggaggcagaggttgcagtgagccgagatcatgccactgcactccagcctgggtgacagagtgagactccgtctgaaaaaaaaaaaaaaaaaaaaaagattccccatgtcatgtgcttttaaagttatgctgtaatggtttattcttgcacatgcttttggaatcttaaggtattatgcagagaggacaagtgttatgcaagatagattgtccccttagaagtgcagaatctggaagtcagaagagtcttctaacctggtctcccacccattgccggactggggttttttgtttgctttttaattaactagtggttacccaccctctgcttgaagactcctggggacagcgagctcattaccttatctggcctgtatccatctgagggcttagttcaaagctctggtttaaagaatcatggagctccagagttacttgtttgtgcctcattccttccatggtggacctgtgcaatgagtgtgcccctcttccacacaccagtcctgcagcttttgtagctggctcttgtctccattctgttagccatttccagttttccccttgacttggtttcccaatcctctagcttgctaatgacccttctccaaatggtttttcaaagacccttcttgtgctacagtggaaagtacaagatttttggagtcagacaaccccaggctagactcctggctccgccctttaagagctgtgctatatctagcaaataacctaatcattaccttacaagatgtgggggaggattaaatatatgtaaagtgcctagcatatttctagcatagagtttatgtcacaagtgttagtgccctaggttatcagggaagtgggtgctctggaaaaaatataattggatgcacattagatttccagtatactctgacttgaatcctgttttctgttacttatagcaacattcttttctgttttcaaattcctcaaccaaggtgtgttgtggaggcctcttcctaccctttcttgcacctgggtctacctgataagccaggagagcagatcttagggtgggacagggcaggggagctgctcaacttaattccctgtgggacatctttagccttggcccaggaaaccctgccttgccctgggggtaggtgagggtgccctgtgggccctctgcccctgtggtccagcatgggtgcttccttattagagcatagtccaccttgggcacccagagtagagacgatacatgtttctgctaagttaggcaagaaagtgatgaaataccagggtcctggcaggcaggctgaaaaacaatgtttaggaaaagtctggcttttttggggaaagggccagggactcaactcttcccacagctgagtgccgagggctgctgtgtcccctcccaggggagccgggtgctgtgtgacaaatggctgccatttagcagctgtgtcttggccttgcaaatctggcagtagttagatcctggcaggaagacatgctccctggagaagagctacaagaagtggagtcagcttcttcatagtcctcatgtactagcaggaaagcttatcactgggactgtgccccatttccttcctttaaagaagcacagagccttgcagagaggtgcaggaagaagaatggggtaccacaggatggttttatctggcattgtccagaaaatctccctagctctcccgtggatcatgttttaaatactcaatctgactgacgtagataaatttggtaggcagggaccctgtctccccagtcaatgtgtgcctccctgctgaagttatatttaatgtaataatttaaatgtccaagtgatttttaagagaagctgcttcctgcatggaacctattactctgcattaagctgctccttcccccacactttacaaaatattgaagttttcctttacctaagaacaaccgacattgcttttgaaaaggagcatcagtagcttgtgttatttctaataaaatgctccaggtcaagaccagcggggtatttgaaacctagtcagagtaaggagcagacaccctggcctgtgagaatgacctctgattttccttcctccaccctctggtcccattaagagataaactgtagtagatggtgagcagtttccaaggctgtaagagggaaccccagggctgcgtgtctccccttgaggtcatctccctaactgttctccccgtcacctgccccttgttgctcactcctcactgcccaggagcagcagagaggtgagggagggtatccggggccaccaggaatcctggctgaagggctcaggtttggaggtgatccacaaccacctccaaggagcttttcgggaagtaccacaggcttggcaactgctgtttgctggagagaaggcttttaggatccagggctgcgtgaaggcccaggccatgtggttttgccagccatgcactgcaggctggccttgcctgtctgaagcctacctctgatgtgtgtttgttcctgaggaagccctgcatagatccattcctccctgtccctcatttattattattttttattgtggtagataaagccagagttagaaatggggatctttgtctctgacccagggccttggtttttgctctggaggtgtatgataagccaagcagcttctcccaaatcctcactaaaggaaggttttcagtgagatcctgagcttcttcatgagctggttctcagggctggatggaagcctccagagagctgttaactcagaaactcacactgctgtgccagcccccagagggtttctgactcggtaggtctggggtgggactgagaatttgcatttctaataaagggctggatgctcatgcccttggggtttgtttggtggagggtctgtagtagttaatttctccctgcctcgtgttggtggatcttctctgcaaggtcagctcatcagataggactagactgttcaggattcaggcagagcctcctttgcttggctgcttctagaacacaagggtatataacgtgaagtgccccatcactttgcagagcaagcgtagtgtttccaaactcttgcccgctgcaacgaaccttttagactgaggtggaagtccagttctgcctcctgccagggagaggagggcagaggtgaagggggaggagagcactccgccttcctgccttgacggggacggaaatggaaagccaggtgcagagcatctggaagggcagcagtgatgcagagcgagattattagaagtcagagaacgtgactaagggagcacacctgtgctctccagccatgggccaggagtcgcacacttttccaaaagaaatttaacagagttcagcaactggatttattacattgctctaccacgcagcagctctaggatcttggagacaagtgactcagtccctctcaacctttgtctttatggctgtacactgggaacaatcctcatggttgttgttttgaggattaaatgagacagtgcatgtggcacatggtgctcaaaaatggttagccatgatgaagtgtgatgggtgtgatggcaacattagaggtgagtgtgtcctggaatttggaaccacgagccatgggtcagtgggagtcatgtggaacatggccatgagggatgaggtcaggagaggggtgcaggcagatattctggggcaaggaactgagcagaaagggtaaccaaggggactggtgtgcgacggggccagaaggtggactgaggccagagcatggagactcttgaatggcaggttaaagagcctgaccattagtctttttttttttttttggagataaagtctggccctgttgaccaggcttgagtacagtgacgtcatgctagctcagtgcagcttcgcactcctgggctcatgcaatcctcctgcctcagcctcccaagtagctgggactgcaggagggtgctaccatacctgcctaatatttaaatttcttatagagatgtggtctcacttcgttgcccaggctggtctcaaactcctggtcttaagtgatcttcccacttggcctcccaaagtggtgggattagaggcatgagccactgtgcctggcttgctgtagtcttgagaggatgagagtataggagtgttctggagctcagaagatacccaaagaggaggccgacatatatatcttgggtcccaagtttgctgccccccttcacctctgcacttttgtcttgaatgtggcctgtaccaagggatgcatccccccaccccggcttcttttttttctgtatcagagatgggttttgctgtgttgcccaggctggtcttgaactcctaacctcaagtgatcctcctgcctctccgtcccaaagtggtgggattataggcatgagccaccatgcccagctctccccaatctcttaggagtcccttctcacccaggaagagaagatcagagttggacgaagcagctcacggtgccccatggtgtaggggcctgctctaaggctcctgtcttaccaaagcctgtgccagccacgggttgccggtgtgggggggtgggggtgactttcttgggttgccgccctatccaaggcatagcctggaccctaagccaagaaacacatcaacttcctggaactcaaagccgtcatcacagctgtctcagccctcagagcacatgtgaggtggttagaagagatagttttgccccgagctttgcaggcagaacaggcatggccctcgtggaacatttagcctggtttgattctgtccccagcctagccaagactcagcccatccttcaagagatgcctttgctgtttgtcaagctccctcctggctcagaccattttagtgtctgatctcttaactaaaacttgtagcctgtcgtgggttggcctgaactggtcaactaggctcttacatagtatggatcagccatcccaagtatttgagggtgttgtggagactctgcactgtgcccatcctggtcaagtgttgtaaaacccactgttctgtcgtctgtgggaacatttttttcagggcctctaccatcatcctaggcatctaaacttattccacatttcctgggggccttaggacagagtttagatttcacttcaagaaccctcaggaggctggggcggtttggatcaccttaggtcaggagttcgagaccaccctggcaaacatggcgaaaccccgtctctactaaaaatacagaaactagccaggcgtggtggtgcacggctgaggtaggagaatcacttgaacccaggaggcggagattgcagtgagccaagatcgcgtcactgcactccagcctgggcgacagaatgagactctgtctcaaaaacatgaagaaaaaaaaaaaaaagaactctcaggtttttgcctataatcccagcactttgggaggctgaggcgggtagatcacttgaggccaggagttcaagacccacctgggcaacatggcaaaaccctaaaaacccaattttagtctcaactaaaaatgcaaaaattaaagttagccgggtgtggtggcacacacgcctgtaatcccagctacccgggaggcttgaggcacaagaatcgcctgaaccagggaggcagaggttacaggctttcagccttggcgacagaaaaaaaaaaagggaaagaaagaaaaaaaaggaaagaaaccctcgggtttttcagaagctgggatgcagcccttatctttcatctcttcattgctgtctccttagacctggagacctgccccttaatcttctgtttctggctttacatagcattgtcccgtatctcccccggggcttgggggctggcctttccctcctcccacagagggacttccgccctctcttagtcctcctgcctccgttgactttgcgtaaatcttgtgggagtgcaaatccagaaattcagcagcctccaccaacaaccagacccaggctttctgtcacacttcacctacaggagtcatctttagggtgctactagtctttcctttttttttttttttttctgaagcattgttgatggaggtaaggggtgtcttagagtttcttctaataactcttttgtacttttccgctcttcaagctctgtgactccctcaggcctaatagaacccaaaacaaacagcctcgtgaactctggctttatattgcaagacattctcaatattcaaatcatttacacccaagggcaagaggatggaagtttcaaggtcaagtctctcagcctagccctctttctctaaaaccatcctctccttgctgtcctgtgtgcttccaggacgctacccggtggacctttttttaaggtgtctttttaaaatgaagggaaataaaataaaatgaaatgaaggggaggcagcagatctaaattttaatggaagtcttagctacatgctagaaaatcttaattctagacacttgtttagactctgaagtgtgtttatttattgtatttatttatttttttgagacagactctctgtcgtccaggctggagtgcagaggcacaatctcagctcactgcaacctccgccttccgggttcaagtgattctcctgcctcagtctcccaggtagctgggattacaggtgtgcaccatgatgttcagctaatttttgtatttttagtagagatggggttttgccatgttggccaggctggtcacaaactcctgacctcaggtgatccacctgcctcagtgtccctaagtgctgggattatagatgtgagccaccgcgcctggcctatttatttatttatttattttaatttttgttatatctttttattttgaagtgtgtttttattaattatgagtaaaactatggttcatgctatttatttggagatcttggcagtttctagaaaaaaaccaaagggctattcctcttcaggctttgttcctaatgaaatttgttattaattaaaatatgaaaaaagaataactgcttttttttaagcaatatttaatttcaccttagatgggtgaagatagtctgaaaggatgtttgtgcatttctgaaaactccacgggtatttttcataaaatgggcttgattcatagtttacaagagggcaggtcatgtgtcacgcaaaacagggattcttaccctgctgtccctgggtgggtttctagggtccctgaccctcctggtactgaatgaaaatgttgagtatagagtatgtgcattgtttcagtggggtgggatggggggggtataatgtccagtttgagggtctctgcattcccttctgtggcacagggtccgtccctgtgggttagtcctgaggttcatggtgacagctgtgtggcatggatgggcagcttgtctgtagatgctccagaaggggaataaaagtgagaaaatatgccaagcagttgtttctcgcccggtgttgtccgtgtggggtttattttacctctgagttttctcccagttttgtgctcttcacgttagctgagggaggctgtgttgagagccagggaatgtggccacatgctgtagctctgggagatgctgcattccagttttctcccagcacagggctttgaagcccttgacaccccagagcagacttgctcaaacttttgaagggcatgtgtaatttgagatgttttctgcatcttccctacagaaaggaaaaggtctgcatttggtcctatttgacgtgtgttaccaacactttctcctcacacctgcgagaggatgtaatcatctctcctctactttaaggcactgtttagttgtatatttcttattatttattttttgagacaaggtctggctctgttacccaggctggagtgcagtggtgcaatctcagcttactgaaacctctgcctcctgggcttaagccatcctcccacctcagctccagagtagctgggactacaggcgcatgccaccacacccagctgatttttgtgttttttatagagacagggtttcaccatgttgtccaggctggtctcgaactcctgagctaaacgatctgctcagtcttggcctcccaaagtgcggggattacaggcatgagccactgctagttgtatatttcttaatttcttcaactgtcttatttttccccctctgtttctgatagcactaattgctgccttgcttttctcttgttaaactggcagtctgtaggtgtctgctgtgaacatgccattaggatgcacgaagctcccccccggagccagtggtccgagccattctcacatggtgctgcccttgacgttattggaatgtgcctgggggataggggtgttcctgtctgttcaaggcacactcagttccaagctcttacttggatgttaatgggacaactctggatggaatcagcctggctcctggcagcttgcttgtaattgcaggcaagggatgggaaatgttttctagtcctaattggtgactcccggtgatgttgagcagaggaccatttctggtcttaatcctcttttaacatcaccttttcttatttttgtaggttgctccgactgtgtgttccaggagtggtggctctgaggtgtgaccctgcccacgtttgggcccagccaggttcagccccccaataaggagggcagcttgataacacaaagaaaacaggttagtgaaacagttttcactcgcagtgagtcacaataatgttgaacgtcgagtcttcccatgccctcctctcctaccctcccctacctcccgtttaattgtcatgccatttccaggtcctcctgaggctttgttgcaaaatcgtgttgaaattgtaactaggccagacatggtggctcacacctataattccagcactttaggaggctgaggcggacagatcacttgaggccaggcattcaagaccagcctggccaacatggtgaaaccctatctctactaaaaataaaaaaaaattagccaggcgtggtggtgcgtgcctgtaatcccagctactcaggaggctgaggcacgagaatcgcttgaacctgggaggcagaggttgcagtgagctgagatagtgccactgcactacagtgtgggcaatagagtgagactgtctcacaaaaaaaaaaaaaaaaaaaaaaaaggaggaaagaaattgtaactataacttgttagttcttgatctgatgggcctgaaatgtgggatgagaaagggtgccaagggttcgtctcaggaagcaacactttggacatctctctctttttttttttcccttttctctccctccctcccctccaaatccagaccatgtgtgttaaaaactggaacaccaggttcatctgcttggtaatgttgatcatatctatgacttgggaacttcatctggtttcccagtgctgattccagttggaagagattatattagaatatgaccagtgatatttatttttaagagacagggtctcactctgtcgcccaggctggaatgcaatggtgtgatcatagctcactgcagctttgaactcctgggctcctgtgatcctcccactcagcctcccaagtatctgggactacagacacatgctaccatacctggcttcttttttcttttcttttctttttctgtctttcttgtctttcttgatggagtcttgctctgtcacccaggctggagtgtaatggggctatctcagctcactgcaacctctgcctcctgggttcaagcgattctcctatttcagcctcctgagtagctgggattacaggcatgtgccaccacgcccagctaatttttgtagttttaggggagacggggttttgccatgttagccaggctggtctcaaactcctgaccttaggtgatctgcctaccctggcctcccaaagtgctgggattacaggtgtaagccactgtgcccggccccggctgatttttattttgtataggtggggtcttgctgtgtttcctaggcttgtctcaaattcctggcctcaagccatcctcccacctcaggcttccaaagtgctgggattacaggtgtgagccaccacacctggccttattttataataataacatatattattactaatattggagtgatgtcagggagaagaaatgttgcagaagaaagaatgaaaagtctaggattgtaaatatccagaaagaaaaaaatgctttgtgaatagaccataaaaatgttagtaatggtcttttattccccgagattgagtatcagagggtttaggttggttagtttgggctgttgttccaaaattgtccaggatgtggttatagggtagataggaccaactaatactggccagcttgctctggttcgatgatcttgtagaagagcccgcatgttatggtgggttttttctaacgtagaacaatgagctccattgtgccttgcaccagcttcttccccttcttccctgctctgtggtcctgaaggaagaactcaaatagaagacataagaacaaactgaagtacaatcttgtcacagcccaaggggctggttgttggttccttctggaacagattctcagggatgaggccagtgactcttttctttttttcaaacagtgtagctatgagtttcattttattaattacgctttcagattagagatgagtctctatttttttttaattgttatttacttaaaataggaaaaggaagtaaatgtaagtgatcttggtgtcatcagtgggtagtgtcacactttatactttatccccaaggaagaaacatgtttagcaaatatcttcctgtccagacaaaatggcaaacaacaaggcttttctccttttcaagtgggataagcttttgcaattttcagcccttacattggttaactatactgactgttgctaggctttctgtgtttaagacacttaggtagtttgcaagaatgtatctttgataacatgactgaaaagaatttttactggcaatttggctctgtttagtgaatatatttttttcactttgcttattatttccctcctctccacttccttcccttattcaatgatagaattagaattttttttataacttaaaattttacatttagtcttaaaggtgtttaacctgttcccagacttgagcaaactctaactctaccacatttttctttcctttttctacacacatacacacacattttgttgtttgtttgtttttgcttttaaaatttgagatggggtcttgctgttttgcctaggttggacttgaactcctgggctcaagcaatcctaccgcctcggcctctgaagtagctgggagtagccctcttttctaaatgtagtaataggacaaaagcaagatcatcttcaaaactcatagtataaattggtggaaagtttgtaacaattacaggaaagagagatttctagtcagttatgttgtaattctctgtacattaaaattgtgagggagatatacgtatttaaaagaaggaggtgagttcagtattgaaggtatccatttatgaatcaagtatgtaattatgtgattgattacaaaaattctagggactgatgactctctttttagtagtccattaagaaaaaattgtgtgtacacactcatgtatgcactttgtgtctacatgttttttccctatagagaaatcacccaaaataaaccttcaaagacagttaaaaacagaaagtttgaaacacagttttttttttttcttttaattttaaaaaatcttttgtagagatagggtcttgctgtgttgcctaggctggtctcgaactcctgggttcgagttgaccctcccaccttggcctcccaaagtgctgacattaaggttgtgagcaactgtgcccggtgtgaagcacaattcttcataaatttaaagggtctgctagcatggggaaatgtcatggaaagatgaaagtatagatgtttttttggggggtgggggctgtagctttcttctctttatggagaaagatgtggacaaagaggctggatccatagtctcaaattgtatgtttctgcggttagtccttttacctaccagttggaaaaccatttgattcacatcttcaaaatgtctattgacaaggaaggtacattttatctctttacaagacaagtgctttccctaagattcccttttgcccttttggtaagaatttaggctggtactgcaggtttgtagctgctctgggtggtaccatttctcatatgctaggtcatatcccctaaagttggaggaggaagccatgagaaatcatattcttccttgtgttgttcctacacgttctctttacagctgagatgatgagcttgatcttcagctgctgttgtggactcgtagaatttattagcacacattgtgggataataggatcttaatatccaattaccttatggtagggcttcagctgtagaatatcctcctagttaaaatgagggaagcagtagacttcatacctactgactggacctgtagccataatagtctagttgcaaggaacgcacatggcctgaaaaagtaaattgtgacatggccatgggccatagttttccctttggtcattcttttcatgtcgccaggtttcttttaggtctgtcctgagagtgtctaaactcagcctttagtgaatgcctgaactgttttgtctttggtcacttttagataaaggcgtgagacgggtcaagtggagcctgagcatccttgcaagggactgaggcacagtgtgaaagagaatttgatgcatgggtataaatatgagctttagaaagtaaaattttactgcagagtccttttggctgttgggagtgtgcgtaacaggcagtactgtaggggttaagataaggttgagaaacagctgtagaatgtggttttggaagaaagaaaggcagacattgcctctcatttgtgctccttgcattgttgtgaatatagtggtctaagattatagccaataaatgatttcagttttttcttcactaagtgaaaagatgttcactttgggcctttgcttcccttccagtgtcaacgagtactaccaagagaagaagacaagaggtcaacacagactcattttctactccgtgtgaatgatagctacagcaggggaaagtttcatagtctatcagtgggtcagaaaatggaggtaatcagcagtgtggcgggagggttcttctttccctcctagggtacgttacctgctttatacatattttttaagaaacaggctttgatatgtcaatttgaaatttgtttgtaactctgatagcgttggcttcttaaatctcttataaaattcaggctccccatcagaatcactgtattgcagcagtggagttaaatgaaacctgatgtttctcatcactagttttaggtctggaacatttgtgtagtagtgaataagcctaggttcttaggagggtgctgcagggcggcagctttctgggctttgtcattgttggcttggcctttcccactctgcctaacccagattaggaaaggtagagaaacctgcctctcatgagtttgagtcctgttggtagtgcacactcagaaaggaggcaaggttacttcgtccttggtatgccaagacttggtttaaatgaaagcttccatcactctgggcgtgaatgtggcctttaactggagaaagacagcgttggatgtttttgacctgaattacaattagagtagccatggccagcgccccctggcaatgacagaagcctaaacttccccatgatcacatcagcaatttccaattttcagttttatagcagaggcttcttagaagcttaaacccctgtcccaatgacgtcaagttcgcccgctggcttggaaggttcagacctatcttccatcaacaccatgatgtcggcggtcatgagtgtagggaaggtcacagagaatggcgggagcccccaggggatcaagtccccctcgaagcctccaggaccaaatcggattggcagaaggaaccaggtaagtgttcacacctagtggtgacctctggtgggttcaatccatgagaacattgggagatgtttccgagtttcctatgataaaaccttggaagaattgggaataaaacggacatacccagaggccttgatcatttttcaagggcaaaatttttatggcttatgttagtttcctttcatggagaaggttttctttgctgtggtgtcgatgttggtggaagtgcccttatttttggccccaccattggattttaactcaagctttcttcacttgatggccatggcagggaacatcactgatttctgtgatgtggtttgtttcctcattcacacagctggctatttttaagtatcttcagattaggtagcaaataagtattgcctgtgctagggctgccgttcagctttctatccttgaaaaagcacagaatttggcttcagataattccagttaagatgctgtttagtcatcttggattttcattgggcatcagatcagaacagggtaaagtaaataggtggaattgagaagggttaatgctgttacaaaagttgatgtcttctctgttgggaaataaatgaatcttcaatgtaagatgggacatttccttgaaaagttgttgctgtcttggcaacatactgttgaacagaaagaaggaaggtggtggaaggaggcagagagtgaatacttctcatttcaactctggatccatgtaatacgagttgacttcctcgtgtttaaagtttggtttaactaatttaatgagactatactaaatccttggagagaaggtggtcttgcatttgtccaggaaccagcaatggatgagaaagcaaacctgctgggcttttgtaaactaattttctttttttataaataatcctactgtggctgtccttatacagaattctctgagtattaatatgatggttttctataaattcttagaagtagagccttaattaaggctttcgatacaacttgccctacaagaaaagttgtaccagccccaaaccctgccagcagtatgggggaggatgcatttctccacaccttgctgaaggatggggacttggcagagttcagtgatgttttagggttggaacattgattcctttctctctctcttttttcccttttctccttgtgcctctcttcctgtgggtgcctgagaaaatactcagcctgtatgactgtggcctgagtcgagaaggagtgctagctctgagaagaaaaggtttatttccactctcatgtgactatccatctatccatctctccatccatcagcccattggacaatatgtacccagttcctatatccagctagctactgtaccaggtgccaggcatttcgggaagaataagacagacaaggttgtcgtcctcatccttctgctctaccaggaacaagtgaagtgataggaagagcttttcctcaaatagctctgagttgtcccaagtccagcctccagatcagagaccgtggttagggccctggaggatgcccacagcacctcccatgtttgcatgctaactggaggctgcctcttcaggtgtgaggaggcaactgtgcaggtggggcagggctgcctttcatccccctcctttcttctccagggatctggtatgctgagtttgcttttgaaatggaggtcctggccagaggtagcctggtaaatacagttcttaatctaaaaaaacaaaactcagtggggagagagtatggggaagaaggaagcattctccttacctgtggactagacagggagtgctgagagacggagcctggggaaagtcccattggtgtgagcttagagttccaggagagattagccacagccggatgctgacaagggtgccagattgtttcattatggaatggttagttatcacattagctgctaattttatctttcagctcaggaggtgtgctccttccaccagcatggctgcaataactggattcagaattctccattagggtgctgggcgtggtggcatgtctctaatccctgctacttgggaggcagaggtgggaggattgcttgagcccaggggttcaaggccagcccgggcaatattatgagacctccatgtcctataaaaaacaaaaacagaattctccaggagggcctctcttccagtatcacagtgctgtcttttctagtaggttcattttattattattattttttttattattattatgttttaaaatagagacagggtctctatttctcaaccagagcatggttgattcctagtttcataaactatacagctaatgtgtgtaaactgtcttaattgctgtgatatctggctttttttttttttaattataaaaaaaactttttgcagagacgaggtttcactatgttgcccaggctggtctcaaactcctgggctcaagccatcctcccacctcagcctcccaaagtgctgggattacaggtatgagccaccatgcttgacatggttcattttaaaagattacatctgggtctgtagacctcctcccatataacttggattttgtggacctgtatgatggcctgcagcacagcactgccagcctcagagaaggctggggtgtcagttcatgagtcaccccagagtcaacacaagtcagccccaccagccgcacagtgtgcctgctgtctattgcaaggtgaatgcaagatgattttttaaacaaatttgtctccctgtggctggtcacttggaggcctttttttttttttaaaacatgtatttacatcctattgatgtatcaccatcctgttggtaactttaaaaattttgtgtatgtaaaattgcctatctactaatttgacaacaataccccggaggtggaactcatccccaacttttggcctggctgtgagacatccctccttgttatgtcttactttgttgctgttgcttttgtttctccccacacccatgcccccatgggggtccttggccagctctactccgactgcagttgtagaactgggcagagaaggtatgacaccccctcccccattatacctcagaaagaactagaagtatgataaatgagtacgactgggaatttgttttttccactatctctaggatgttcatgttttgtagaatccatatccttaattctttttgtgtgaaaatgtagagcatacctagttctcagacccaattccatagattagaaaaaagttttggccgggcacggtggctgatgcctgtaatcccagcacttcgggaagctgaggcgggtggatcacctgaggtcgggagtttaagaccagcctggccaacatggcaaaaccccgtctctactaaaaatacaaaaattagccaggtgtggtggcgcacacctgtagtcccacctacttgggaggttgaggcaggagaatcacttgaacccgggaggcggaggttgcagtgagccaagatcgtgccactgtactccagcctgggcaacagagtgagactccatttaaaaaaaaaaagaaaaagttcctattgctcagaatgagacttgtttgtctttgaagaggagtgagagggaaggtggctgtgagctagacatcatcatgccttcattccacccgtctggtttatggcgccatttgcttttatagtcttcagggtgacttttattttcatcatctcccataagcaaccacaagagtgtttcctttccgtgccttggggttaatccttttggtcagactttatatagagcatagtggcttagggcatgggctgtggagcagctggcctgggttttaatgctgtgcctaccacttaatagttctctgacttggggcaggttacttgcctctgtgtaccccagtttccgcatccagaaaatgggatccataataatgcttgtctattagtggttgtgaaaaaaccctgatggttctgtatagagtttagcacatggtaagtgtgcagtaattggtgttatttgcaaggagcagaaactcattcaaatgaatgcaagtaaaaagaggtctattgaaagatgcccgaggataggaaatgacccagagcctagacagagcatccagccctagggacggtgccctccatcccgttgggttaacactgacatcttccacactgctttctcctggcttgggcttgccgaggtgcaagcctccttgggttcagccctacctctccatgaactttcaattcaagtgctcataatcacccaacttagtaacttagccatcctcaaacctgggcacatatcaccatcatctggggagcttgtgagacaaacagatttctggggttctactcccccaaccccagtcccccagtgactccgatgtggcacgtccagaatctggttaaatgcatagaaaccaaccccccaggtgattctgctgatcttcagaaatctctgagcatcccaactccaaattactgggagaggtatccaagcctaggtccagttagttttgggtattgagacaggaacccgtggtcttagggactgtgggggtgaggagtcaatgatgcacacagcctagaactctgcatgaattatttggaaagaggatctgtagcatagggttagtgaacgacattggctttttctgaaaaagacaaaacatactgcttgacctgtgcattctgagggaacataaaaggagccccctcaccaagtagtgagctggttcttttgtcaccttctgtggaagtcttcagtttgggttggcattcctatcaaagttgtcgtgataaggacagcaattttctcagtgtgatgtttttgttgagtatttatgagcagtgttaagcagatgctagcagtgggcaggggcatgcccactgggtgcacagctaggcactgagggcttccctctttgtagggtgggctcttctgatgagaaccttgttatctctcaggtgttcttggagaccctgaaacctgttgcaaaatagcccaggctggacttggggagaaatgtattcctttctagctcttccgtgagtcaatgcttaatttttcaccatcacagattattaagtggtgtctgtgtaattagaatgctagtattgattgagtactgactatgatcccagcactgttctagtgcttggcatgtggtaatttaacctgcatcacagcatggtatggtaggtggtactgtttttcccatctttcaaatgaggaaactgaggcagacagggccgtgacttgcacaagcttatacctgggcaggttctggagcccatgctctcagctacatagacacaagtgcttattacacttattacagaaagaaaaggcacttgttgactgtgagttgaaatttatcttcccttttaatctttctttttaggaaacgaaagaggagaagtcttcctataactgccccctgtgtgagaagatttgcactacccagcaccagctgaccatgcacattcgccaggtagattcccactgttcttttattttattttattttattttattttattttattttattttattttagtcaagtgcagtaatgagaagagggggaagagtagaacaaggagttaaacactcactgtgagcaatcagttgagataactcagtaccttcggaccagcctatttttgatctaaattattcttccttaagcacagggcagggtaattggattttaatggatgagctgtagctgtgcctaatttaaatttagttttttaaataattttgggaggtggttatgaaatgacttttgtatatgcatattcctgtgacaaagtcttaggtcaacacagaattcctttttggctgggtgcagtggctcatgcctgtaaccacaacactttgggaggccaagataggcggatcacttgagatcaggatttggagaccagcctggccaacatggtccagaccagcctggccaacccatctctaccaaaaatgcaaaaattagccaggcatggtggcatgcacctgtaatcccagttacttgggaggctgagacaggagaatcacttgaacccgggagcagaggttgcagtgacccaagattgcgccactgcactgcagcctgggtgacagaccgggactctgtctcaaaataaataaatctcaaaataaataaataaaataaaatagaatcgctcccccccacacgtgtgtgtgtgtgtgtgtgtgtgtgtgcgcgcgcgcacgtgtgtgacggagtctcgttctgtcgcccaggctggagtacagtggtgcgatctcagctcactgcaacctctgcctcctgagttcacgtgattctcctgccttagcttcccaagtagctgggattacaggcgcccaccaccacgcccagccaatttttttatatttttagtagagacggggtttcagcacgtttatattagtataaacgtacataacacagaaggaaatctactcagcttggggtctttttttgcttttctcctttattatgagatttacccttcttctcctgctgtggccaattcatgacaaaatattgatgagtgtagaacagtgaaggattgatgacctagtaaaatcatgacatagtactgaattaacatcaagttactaaagtaactcgggtttgaatagaaatgttcctttttaccgtctttcagaggccaaaactctaccctgtgcaggtttcagttctctttctctgacggcaggcctgagtcatcaaatctgaagaagggacgttgactcctttaatggaaggacatatttccttcactgttgagtgtccttcggcttgtaggagttaatatatgtggtcactgaatctgtatgtggttcaaagcaagacctgggaaggctctacttctttctgagcctttcagtagaagtagttttcaaaacaatgtgggaatggaggaatatcatacaaaatatttatttgcctgttttcctgatacattttaccccttcagaaagatatttaaaatgaaagagaaacacatagccaagaaagttgattggtttttttaataaagctctggatctgcatttcctaagagctgagcttctgatgcactttcttaagtgaccgctgtgaccattgctttctgcagcacaacacagacactggaggagccgaccactcatgcagcatctgcggaaagtcactgagctcggccagctccctcgatcgccacatgctggtgcactctggcgagaggccttacaagtgcactgtgtgtggccagtcatttaccaccaatgggaacatgcacaggtgggtgagggcgccctttgcttggggggttggctggtacttggaggttggcaggcaggacagtggcctctgagccttcagaagacttgcctaaaggtacagagagttctggagctctgtccattgtatggaaaaaccagagatgcacactatctctggggtattagaggtgaagtgccttggcaaggtctgtggcccttcagagttcctcaggatgaaacacagagtcatttcccctctgccaattggagttggttgtttgtttgggtgctagaagtgggcagattatcacatgtaagagaggaactctccatgagtagcatccacgtaaccctgccatttaaaaaatatttgcatatgcctaccagattcctgacagaccttttcattgcaaataaaaacaaaaagtctgggaccttttaataaatagttaagtggactggtcctggagcttcaggataagataggataaaattaagaaaaagaaaatctgataaacatcaggacattaattcctgagagagaaagatgctcactcaagtgggagacagtagagtggtagacatattaaaattgtttggggtgaacctatggaaaatagagtttataggctgatcatacatgttttgaggggtttacttttccatattcctgtccagtccttattctgctttcttttaaaaaagttgagtcacatttgttacatgtttatttcaaaagaaaactttatataactactataaaattgatatgctagttatatttggttatataaacactaaaatgagttggaccagtttattacacgtacacatgggacatactgatacagcggttaagtttcttgatttgggaactaggcacctgaattcaagtctcaactgctacttgtaaattttctatcctcaagcaagttacttaacctctttgtactccagtttctcatctttaaaatgagattttttttgttttattattttctttcatgctattttgaccccccaaaacgagatttttaatcgtacctacatcactggataaggctgaggattcggtgctaattagtttagcacacagttcctggcacaaactaagcactcagtgtttattattatttgcgtttctaagtaatgctgcagtaatttaaagccagtgtatatctcagtctaaactcttagaagtgaggtatagtatgacttcatgaaaagtgaatattttaagaatttacaaagtgttttgctttttattttctcataaatttcagtcctgatgggttattctctttgcccctcatctcttcctgggactgtttttgggtacaaaggaattgaatagtgttactattttacaatacaatattttgcattttagctttttatttttttaccaccatgttggcctgttggtatcctttatttttgccttctgtttaggtctgctcgttctacaccccacacccccaaaaagtcctttgtcctttacatatttgcccttctcagaatctggtcctagaggtattgcctgttcccctcttgggggttccatcactttttcctgctgagcctctgctcagtggaactccccatgggccagctccaagttggcaggggcaagtgggcacattggtaaagaggcccctcctagtggcgttttggccctaaccactgaccactgtgatcctccatgagacatctcttgatggtaggcccaatcactcctgattcagacattttctattttgagacatgattgaaataaacacagctataaaaggcgtagttattgtcttctacaataacctgtgtggcagtgtgtttttacaaataatcattgctgaaactgtggtgctctgggtgtcatatctgtattacgtgaacacatgtctgtattcacttttcattttttttttttacatcttacggtataattcatacatcatacattataccgtgtaaagtgtgcacttcagtgggcttcaggttcttttttattgttaaataatagttcattgtagaaatatgatacattttacttatcccttgatcagctgatggacatgtgggttgtttcaactttttggttattacgaacaaagctgctgttgacattgttgtacgacattttgtgtgggcctgtgtttttatttttcttggtagacacttaggaatggaattgctgggtcatatggtaaatccatgtttaagtcgaggaattgccaaactgttgttaaaactttcaatttgggggtattgccatcataacaatactaactcgatctatgaacatgggatgttttcccatttgttaagtcgtcctgaatttctttcaacgtctcatagttttcagagtacaagttttatatcggttaaatttatttctaagtattttattatttttggcactattataagtagagttttctaatttaatttttcagttgttcatggctagttaaaatttatatattgattttgttccctccaaccttacctcatttattcattctagtagttacttagtggattccttatcctatatcatgtctgttattcattttctcgcctacttgccctggctagaacctgcaaaacaatgtcaaatagaagtgaagagaatgaacattctttttttgtttgtgatcttaaggagaaggcattcagtctttccccattaaatatgatgttagttgtgggttttttaaataaatgttccttaccagtttgagaaagtttctttcttttcctagttttttgagtgtttttattatgaaaaggtattggattttgtcagatgatttttttttttttttttttttttttttgcatctatggttgggttgtttttgtcctttattcttttgttgttgttgttgttcgtttgttttttttgagatagagtctcattctttcacccaggtcagagtgcagtggcgtgatctcggctcacggcaacctgcgcctcccggtttcaagtgattctcctgcctcagcctcccaggtagctgggactacaggcgtgcaccaccactcctggctaatttttgtattgttagtagagatggggttttgctatgttggccaggctggtcttgaactgccgacctcaagtaatccttctgcctcagcctcccaaagtgctgggattacaggtgagagccaccgcgcctcaccccagattttgtttcttcttgagtcagtttcaacaatttgtgtctttctaggaattttggatatttcatcaagtgatataattggttggcatacaataactcataatatccttttgtaatcctttttattctgtagttagtaataatttcctttctttcactcctaactataataatttgaatcttcttttcttcccttagtcaatctagctaaacatttgtaaattttattgatcttttcaaataaccaacttttggtttcattgatttccctctattctgttctctgtttcattaaattactgttctaaacattattattatccgttttctgctttctttaggtttagtttgacctttttccggtgttatagcaaagtataaggctggattattgacttgagaactttttaaatacaggcttttatagctatccattttcgtataagcattgctttagttgtttcccataagtttttgtatgttgtgttttctttttcattcatctcagcatattttctaatttcccttgtgagttcttctttgacccattggttatttagaaatgtggtcttcagttttcacaaatttgtgacttctcaaatttcttattaatttctagtttcattccattatggtcggggaaattcattctattaatttgttactgatttctagtttcgttccattatagttggagaacatactttgcatgatttcaaactttgtgaatgtactgagacttgttttatcacctaacatatggtttatcctggagagtgttccatctgtttgagaagaatgtgtattctgctgttgttgggtggagtgttctgtagatttgctgttgggtctagtaggtttatagcattgttcaagtcttccatttccttattgatctccatttatttttatgtactctgccttgtaaggattgtataattattatcccattttgcaaatgaggaaaggactaaagtaatagacagtgctaagatttgaataaaggatatctggcttcagaggccatgcttttaactaccacagattgagtaccccatatccaaaatgcttgggaccagaagtgtttgggattttgatttgttgtttttttgttttgttttgtttttttggaatatttgcacatacataatgaggtatcttgaggatgggacacagatgcaggtctacacacaaaatttatatatgtttcatatacaccttatacacatagcctgaacataattgtatgcaatatttttgataactttgtgcatgaaacaaaattttgactgggacccatcacatgaagtaaggtgtggaattttcacttgtggcatcatgtcagcactcaaaaagttttgaatattgaaacatttcagatttcagattttctgattgggacgcacagactgtatgtgagaaataattgatgtagcttttgtgtcactttgcatattagaaaaaaagcactctttcactcttttcctcattctcaacacaattctgtgctgttatagaacgttattttcaatgttaaactatttctgtcatcccagtagcatattctatgtatagtgagcatgggatagttttgggggcagccattttgactgaattttattactctgtgttgtttgggtttacttggatagtcttagaaattattttgaattttttatagcatagcccttggtactattctaagatacatttctcatttatggtcattgtattttggagttgtttataaatatttttttaaaagcaggcattggccgggtacagtggatcacacctgtaatctcagcactttgggaggttgaggcaggcccatcacttgaggccaggagtttgagaccagcctggccaacataacaatatcatgtctctactaaaaatacaaaaaattagccgggtgtggtgatgtgtgcctgtagtcccagctcctcaggaggctgaggcacaagaatcgcttgaacccaggaggtggaagttgcagtgagccgagatcttgccactgcactccagcgtggggaacagaagaaaagcaggccttggtgctacttgtttgtgctaattgttggttttctggtactgattttccttattttgaggcaccttgaatcagaggagaggactaaattggggctaagttctaatcttagttctgcagaactttgtggaaatctcttaaatttttgacactttaacagaatggcttagtattacctcatattgaacttgggctcagatttaataatgtttgtaaaagggttctgaaggtttacagtgtactatggacatgccctaggtagagggagtttctgagtctgtattgttagagctgaaaccaccgtaatgacaatctaaggaagtgttccactactagctgtgtgatcccagacaagttacctgacacctctgtgtcctaattacttcatctgtaaaaggtagtattatccgtacctaccgcatgggaatgttgtgatgatcagtaaatactacatgcaaagcacttggggtagtgcttgttaaatggtacatatcagtaatggttactactcttttattgttgtatgtgccagagagggaaaatatattgagtaaacattcatataatgccagaaaataaattgagtaaattgagagtgatttcttttaagtgtgcttgttttactttttgctacacttaatctgtaatttaagtaataatatatttgaaatactagggattatcatactacatttattatgtctttgcagaaagttgcaaataatgagttaaaagaacatttgggttttggtaaatcacataaaagtcattaccatttcatttgttagcgaaactgtacttttgaaaaaaattataaaaatgtgagaacacttacaaaaatgtgccagagagaatggagttagatttatttgccccggtggatctgttccagaatctgagactctagtagtgagctgtgatctctcccaagcacatacctgtgggcctgtgttacgttaatcaggggccagaactgccctgggatgtgtgtgcaggaattaaaaagagtaatgcaacccaggtcctgagaagtatgaaaggaaatcagtcgatctgtgagagtttagtgcttaagatcaaagttctttttcttgtttcccttccgctaccactgcttcccaaggtctgttggcacctgctgggattgggtagtgcacaggaattccctcatggggtctccagagccgatgctaagctgagggatcagagaacctctgcctcagcttcccaggacacccacacccaggtgcctccgttccatcttgtttgtaacccgtttgaggccctccctcaactgtgccagtttcatctgacatggccctgtgctctgatttttgactcttcccctgaggggcacagattgggtgggccctctgctgcggcatgattctctgtagcgtggatttctggagtttcatttctctgaaggcttgattccacaaggctggtctgtgctctgctcctcaacagcacagttgacaactacacagcttacccttccccctcctcctgctcaccccctgctctgaaggctgtccacacgcacacgtgggatgcacacctccgtgtgtgtgcacactcttccagatgagcccagccctccggtgttgcctgcttgaggcagatctgggctccaccccaaagttcgttgttttttggttttttttttcgttttttttttttgtttttttttttttttgctgaaacactcggcctcacaacacagactctgaggactacatcctttcaagtttcaagttactcttagctgatattgaggtgcctttatagagcaactcactctatttcctttggcctgtggtcattttatgagtatttgttagttatctgtatttgtaatgctactcagtctttttgtagagtttcctttatcttagttttataagaggacactcagaattgttatattggtcaaataaagtaaacttcacagaatgaaggtagcatattaaattatgtgtagtcattgacagttgctttgtagcactgataaagcctataacttactatacttttttctagtaaataaatttacttgatcttttaaaagtaattatattttggcaagtagggagatgagagtgatgctaattccaacttattttgagaaaggttaggataaagacctttttaatttattacttatattattttaatttattttgagaaaggttagggtaaagacctttttaatttattactatatctggtacagctttgtgagctgccacttgcctgtatgcagattctcatgtgtttgaggtttgaaaatcctttgtcccaagcctttctaaccacagctcagttgctgagcagaagagtaggttaccatcaagtacaaaacatgtagcacggaaacatcactgtggatccagcttttaacttcccagaactctttatcagttgctcccacgttgaaaatttggattgagtggtgctcgtcttccaaaacaaacttgggaaactgagccagagcacgcctctgggagagctcaatgtaggaaaaagggcattgagctttgcagtttgcaaagcttgttccaggaagtgctgagctgcaaagctgtgaagaaatgatacttgaaacagaggatagaaatgtgcctcatttggaataaagcctgtctctaaaactggtattttccttttaaaattgccttgggaaaataggaaattaattttcactttgctccttattttacagactgtagacttttaattctaaagagttgtggagcatgtcttacatttaagggcatgcttaagaccctggcaggggcaagctttcatgactaacttcactgattctttgaagagtagggatgtgttctgatttcagctgtcattagaatggtgaagatgggccagtactttgggaggccaaggtgagtggatcacttgaggacaggagtttgagaacagcctggccaacatggcaaaaccccatctctactaaaaaaacaaaaattagccagattacccataatcccagctactcaggaagttgagttcacttgaactcatgaggcggaggctgcagtgagctgagatcacgccgctgcactccagcctgggcaacaaagcaagactttgcctcaaaaagaagggtgaagatgaagaagggaaatccttggaacatcatctagttgtttcgttgcaggcttttttcctgcagccataggcacgattttttctgttgccaagtatgggagacataggccctgaggatgcccctggacatcaggataggcttcaggaagaggcttatatgttcctattatgcttgaagaaaatattagctgcgcagaaatgtgacctgctccatgacaaatgagaccacgaaggctctgaatttagcatgctactctaagatgcttaggctaagccagcccttggcgcacaactgcagttgggtatctggaacaggtggccagtattaaatgagacaaggagcagaggtagcacagtgtctctgaaagcaggggacagtcacttctttaccctcagttccccgcaagaggaagggtcctgtgaacttccatcatggtcgtatcaagtttctgaggacaccctgtatgtagctcgttctggcgcttgctgcttctgaagggtggaggtgaccactcaaaggttcagtcagtcccatcttaaaattaatgtcataatcaccaggtccctgtccctcttgacatattcttctgcaggaaggaaagtatcaggacagttcacatgggaataaattatatatttatttgtaggataaaaatctgtgggtcaccctgccccggactgtgtgaatgttttgtttcccttgaaatacttctatggaaaagaaaatcttaaaagcatttcagttgtctacatccaagggggaaggacaaatcaaaagcaaatgtccttcagggatgctcagagatcttaacacatttaactccacttagaaggacataaatgttctgtgcaaagactgttgaggggttcgtgtaaatgtgattttaatgggatatacgtagtcagcatagttgtatgaactgtatatatctccttatatatgttgggcgtttagtgaatatttggtactgtagtttcattatgataatacttgggtatcaaagcagttttcagcatatgttagtactctgaacactaaaatagacatacttctggtataatttagaaagcttttctttaagaagggctgaaacttctcttttcaaccagattaaaaaaaaatatgtaagtgtaatatcccattccatgatcattccacttaatatgcttttcactcttgagagtgcaccttggtaagaggcccataatcttccctccagagtggagattttccactagataagacatggagaaaaagagcggatatttacaaatctgtttattgcagcagaatgtctgggctaccagttccccccagtagcattattaagctttcaccacataagcttattgattgattaaacaaatttagcctttctttacatctcgttggctggatttgaaacctgggtgcttttgtttttacttcagtagtggtttaaagaagggcgacattttctttggtgcttctgagtcctctgatagctccgcctaacttttctggccagggctgataaaggatactccctggaatggtcaagagcctcaatttcttcatctttagtgggggtaacgtttactcacaaaatccgttagaaggattaaatgctgtaacatatactcaagcctctggctcacgttaggtgctcaacaaattgtagttcaaggccttcctttctcctctcccttaagatatttaacccagcagttccttatacatactagttcagcagatggatttactaaagtgagaaaatagactcccagcttcttaacaattggggcaacgtagactgcattctaagaacccaagaacctggtaacagtgctgtgtatcatgtgctgaatttccatggccaagttgtgcaaatccttattatttgaacacttgcctttttttcttcttttttgattgcttgttctatgatgtttacatatatatgtgtgtgtgcttgggttttgtgtgtgtgtgtgatttttttgttttgttttgttttgttttgagacggggtctcactctgtctcccagggtggagtgcagtggtgccatcatagctcactgcaacctcaacctcccaggctcaagcgatcctcccaccttaccctcccgagtagctgggactacaggcacactccaccatgcctggcctatttttatactttcttagtgtggatttgcattaatactattagatgagattctgtggttctttccagaatttttactttgcattttagaaatctgtgaataatcgaaagctgccactatcctctgagaaaaagggtaggcaagtgtgatctgtcactgaattttattcttcaaattagataaaaagtgtaagaaaattatcaaagctaaaagttggccaattttaattgacagtctcttgtgtagcctgttttttatttgctagacttgaccttcctcaaaacatttttcccttttactttgtgtttttttcttttctaataccctttaacaatcagcacagcttattttatatatatgtgtgtgtgtatatatgtatgtatgtgtgtgtatatatatatatgtatgtgtgtatatgtgtgtgtgtgtgtgtgtgtgtgtgtgtgtgtgtgtatttttttttttttcttttttgagatgaggtttcactcttgtcgcccaggctggagcgcaatggcacaatctctgcctcctgggttcaagcaattctcctgcttcagcctcccgagtagctgggataacaggcatgcgccaccatacccagctaattttgtatttttagtagagatggggtttcaccatgttggccaggcgggtctcaaactcctgacctcaggtgatccgaccacctcagcctcccaaagtgctgggattacaggcgtgagccaccatgcctggcctattttatatttttgaagaaatatttgaaaaacctcttgtggccgatgcttacttttgatttagaatttctctctgaattgaattgaccaagttcatgttcagttatgccaaagagcataacaatcataaaactgtccaagtggacactgtcccctcagtggacatgttaagcaacaatcaagcctttttcgtcctatcactggttctcaaatttatgatctggttcataattagttttttatcatttggccaactggatgctaatatttataacttaagttttcttctgttttagcagagttgttgtcagtttgtgttttggaaaggaaatgcaaaataaattttatctttaatgcaagcagtacagtatttttgacatatcttgttgaggtatttcagcagctcagtcttaccgggtaaaactggtggatggcagcagaatctggaacatcgtgcttgcccacacttgaacagcaggcagtggtgagagtgagaaattaggttagggaaggttagggatgggcttgctgggggtaggatgactagcagagagctggcctctgctccggaatgcaacatgcccaggtgtcctctcccaccatgcccctcgtctgatgcactgagaactttgaacaggtcctgagtgtgtgtccggtttagtttcataactcgaaagtagcaaagtcaagagggagcctgacttccagcattagatcacaaaatgaaacctgcagggagctggcagcatttccaccgtagcacttcacagggctttataccttacatttttccgcctttgtttaaatatccaacctgtccgacctgttcgggctgaacaagctggtgctagcaaacactgaagcgtgcccactcactgtcaacctttttctgatgtgttaaggaaggtgattagtggcaacattgtcccccccccccaacccccatcccaccctccccactgaaacatgaacaggaagcactgaagtcttagcctgtgtattcatgacacggatcctcatctcacctttggcatgtctgtgtgcctgtgggccatcctcagcttctcttggggctctgggatgcttagtggaaaggttgttggccttcagtggagacagattttgtatttccttaaaccggagattcagttgcataatgggttcattggtcctgtggtgtcagcacttaattcttccttttcatgcttatataacccagcttgctcaagaggactgctgttccaagtttatgggtgggaaaactgaggtctgccatgctgcaggttcttctggggccctcctctccagtttctgttggtagatggtgtactgttcctccctcgacatctctggagaacagaggccatgtgtgcaccatgtccatccgttttagataaaagtggctatagacggccttggtcatacagaagggctctgtcgcctggttggtcttgggaggtgacatttctctttggattcatttatattcattctctctccaatcttggttcccctttccttgccagcagtttctcagtggcccgtaagtaatataacacaacatccccagagtgggtggctttcctttttcactacgctgcttcttgcactcgcccacggcaccttccacttcccttgtgggcgcatggccgaccatctgggatggccccacccgtgcatttcttgttcctcttttggaactggctgaggagtagcagtgacttagcactgccctatcatgaagatagtcatctcttcctcctgcacagaaagtgagtaagtaactaggtcctgccttcttgaagacacctcaagtgatcgcctttcaagctgaagtgggaaatggcccgtgacttcagcacttccctcctcctacagagcttaggtgtggggattggggtgtatgattttagtcgttgccctgggaagctggtctctggtggccggcgatggcttccctcagaggggacagctctgggctcttgagatcactttgggaatgatgacttcagttggggcaccatcacctcagactgtaatatggggatattcagcatccctgctgggagaggccagccatgagtgtggggatttggaccccaggctgcatgtaaatgttgaggaaactgagggaggttagcctggggaagaagaagaggccatggcaacacagcagctgccctgaggtatctaaggcctgtccgtgggaaatgagagccttccactgatgtctctggactcacccaggaaggtcctagctggccgattatagctctatgttaatgagagttctctttgggtgagaggaacatcaattcatccaacttctgaggtcttttgtttgtttttaagaatgtctgactttgtatggacatattactatgtatttttgtggattttgtaaatagatatggggaccaaataacatgaaaatttattttagcaaaacacaagcaggcaagggaaaaagacaagcacaggaggatgtagggtgttactgattcaagggtagggcagttaggaatcatgtctagagtaaaagatttttaaaaggttagtgctggttcatgtggactgccaacacctctctaccccctactggatctgaaagtcaggagaggaggaaggagctgtagaagcagcagagaagggccctcagttttctaagtagacagtcattagcaagagaatgtcatccctcaacccttggcccaggagtttgaggctgcactgagctaggattgcaccactgcactctagcctgggtggtgcagcaagattctatttccaaaaagaaaagaatacatatccttcaggcattataattctagctcaatgcatcattaaggaagtatctgtaccaagaatgcagaagggtctttacccaggaccaagatagaaaaggaactgctctctccaaatactgccaaggaacctgaggtaggagagcagagatggtggtccagcctggagaaccatgaccccatgcctgggtttggagagaagctctgggctgatgagccgtggagattgagagtccaccaaagcgtttgcttataaggaacatgaaaatgaacccctggtactcctggacttcaaattaagattccttaacttctgataaaatttaactatccttatactggctcccttggaataccatgctacagtcaacagatgagagacgttctctattctggggacgtattgccctagtattgcagggaaagtgggggcttgtagaagacatccatgctgtggagcatgtggtctttatagacacctcccagaatggaggcagtaggaataaacgtcagtatcagccgcaaagcttgactttgtcatggcctctgtgggccatattgcccacatcagagactgtgggatctaactggccagtggtggtggctgcagtgtccggtgcatttcaccaggagcatcctgcgagccctgggagctgcctggctgacggcattcccacagcgagcctacagactgtgggtttacacttcatgccaggctgactttagatttttctaagggctggctttggaggtcagcacaggtgcttacgcattgtctaaccttcctccacaccctgggagagctggtgtgacctgccttccggacaagcatgactgaacccatacaacacctgaattactagaaggtgcctctgtactttacaggtggggccacaccaggaattgctcagttgccgccttgctgtcctccccccgccccctccctctctgtgtctgctctccatcccccatttgtttgcatagaacttgattggcattacaagcatcatccacagccctccacactgaactcctaggcatttgttaggaaaacatacacacatctttctagaatcatactttggccagaaatgtaggttgtgcagctgtgggggttcttaatcttattcgttccctctttgtttatcacaaagctttgttggacaaaaaaaagcgagcaccaggtacggatggggatgtctctataaccaggctgctagaccctgtttgaacctgttgcctccagcttggcaggtcctgggccgtgctgtgtgtgctttgtatacagtgtcctgtgtcctgacggagtgactttccttacggtaccattcactcagagtatcaaagaagttggctccttcattaacagtcctaggaggaaattgagactgaaaagttagcaaatactggaagtgtctagatttctcctgaggtttaaccttcacatgcaaattacatacggggagcttgaagaatgtctgagacctgctctgagggcagctatgactaagtaatctttggtttggatcacatttaaacttgttgagagtttcccaaaggattttgcccccaaaagaattttaagaatgttaaatttcccaactttttggttaagcatttatgcctggtaaactgatggagagactgctggtatattggaagatgagtctgggagatgtttaatgctggtatccaaaaaatgtcagtgtcctggtcaaatggttgaccgaacctgcaaacggtgcagagagctggagaagttcactgtgatcccatggttctcacacttaagcaggcttcagtatcacctgcagggcttgtgcaagccagactgctgggccccgacccagcgctaccagtctgcaggcctgggatgggactcgggggtttttatttgcatgaagctcccaggtggtgcccatgctgctggtcagaagcctacagagtgaacactggtgttctaggagactgacaggattgtccccattttaccagtgtggaaactgaagctgaggtagcccaagattctctggagtctccgtaattactaggtggcagaacagagatcacacgtctcaaatgtgtcactgctcagagaccacccaaaagcttcattgcatcacatggtctctgtctacaccatctttccacccagattcctgattgctgctcagagcaagccagtgcttggatagctaagagctttaccccattcccaaatctaatgacttccatgcctaaggaaggtccgcagaaagttcctgtatttggaactggaaaggagaacattcagggaggcagggagggagggtcagcttttagggattggtctgtctccctggagttattgaccagccttcagcccttgcacagggtgtactctttggtttaactctgatgttttcaatattcttacagacaacctaccctgctaaaatggaccatctcaaattttagaaagcaaatgattacacttgtgggagaaaagccatttaagttgaaaatcagcatctactcctagattcaaagtaggctccagttgtgccaaaaagtgctcagatttgggggttttttccacgtttaaaaaacatctgctatatttgtgttcgttcatcactgtaaaagcctctttgggtgttatgaataggataaaacttctcttgactccaaaagttctgataaaattccttcctaagaccacagtgcggtaggattcctactgttaaagtgtcatgcttccaaaagaaaattacagaattttatggaaaggcagaactctacttggattttatattaacctctctctacaatgagtgtaggtattgttttgaatgaacaaacatatgaattccaatacgaaaacattaacacatgtcctcagtgttcattgttggagtgttttcgattgaagtcccttcagtgtggcactgttcataatctcgtgtcatgtttgctcacaccaaattctagcaaggcaagttataagatgtcctggaacctgagcgtgtatgtcatagtaatactctgagtgaagcaaacattttctacatatacttcattccttccttccttcatttgtccattcaggaattcaacaaatatttatttgtttgttcttccatccagcaatttagcagatacttactgaccaacacctatgtgccaccagggctcgtgcagagaacaacatagaccaggttcttgctgtaatggaacttactttcaactgagggtgaggggacagtcagacgagtaaaatacatgatatcttcagctactgctgtgtgctgtggaggaaggaacactgaattgtgggtgtaagagcatctgcacaagtagggtgtggggcctcagggaaggctttgcaggtgaggcgcgtggcacgaaacctggacggcaggagccaggcttgggaaggtctggggtgcagttttccaggcaggagcagcaagcatcttgagtcccagaggcgggaactagttggatgcatttgagggacccacaggggctagtctgtctgaaagagctttgggatggaagagggcagggtgctccactattgaagtctagcagataggtggaagccagatttattttaattctaagaatgggactgtcagaggaatttaagcaggggagtggtatgattggtcctgtgttttagatgctcagtctggctgctggatagaaaatggaaaataagagagcaagaggaagagcagaggggccagcttaagatactaagaccagctggtaggaattcctgccattgctagtgtttgtgcaatgtatccattgaaacatgaatccttatatatggatctttgcacatttgttcagttattagaccttaagacagatttctaggagtagaattactgaggcaaagagcatacatatttaaaattcatatctctagtgctcagccactttgcagaaaggcagtcactcatttctactctcaccaacgatgggagagtaccagtcttctgaaccacaccaacaccgcatattgttaatgtaagactttctcaccctcgccagtctggaaggtgaaaagatgcactgctcaggtgcagaatggaggagatgtggtttgatagcagtaaatgaaggaatcgtggggattgtgattgacaacaaacttggtaggaactgagggtataaacacacccaatggaacccacccaggctccctttatgtaccttctggaggtcatagtgccagccatgtgccctgagctgtcagatcacatccagactggagtttgcatctggatccagcatttcatgaaggatacctgtacgctggagagcattccaaggttacttaggaccagtataattccacagacttgcaagcagagcttgaggggggctgttcacttttgaaaagagaacgcattacagaaacgcagtagtcctcttacactatttgaagagctgccacgcagatgagaacatggactgatgttataacacagcatctcccttgaggacagatagacagaatttctgactcaatgtgagggagatggttttaacaattagaacagccagtgaaaatggagaagtccttgttggtggaagtgtccaagcagaactaaatggtgatgcctccagtctgctgtggagagggactttctatgcagagtagagggctgaatcccatcccagctcccttccagttcatgggctccttgtcatttattgactctcaggatgcgtggaaattagacaaattagcccttgaaatcaaccctgagagaaagacaagacccaagccttctaaggattggaatactctctttcccaccacccctaatttgttttggccacagcttgagggaaggggtcattagtgtctcatcatgatgatcctggctgcacttcctgtgagcttttgggaggaaatgaacagctccagttgccactcctgttgttggaggctagggaagcagagcaggggtcagagcagtggggagaatctctcactacatcaaatccatcgtcagacctggccggacccctccaaccctgcagttcacccgtgggctgaattgaggttgtcagtgcagcttttgctcatcaagcggctggaaggacaaagcaggaacttcccatgttgtacccggtagctggggatttcaccctgaaatggagcggtgcttgtgcttttgcacctggggctccggggctcagtgggagaactggagtgagccgctgtctgtcagactgccttggcctgctttggtcactctgccacttctaggagtgatgcagttcaagggcagccctggttttccagactaagccagaggctctgcagtccttgagcaaaactggaggtgggaatgttctatgcctgagctgtgggctcctcaccctcttcactttggtagtaactgtgccaccttgggccacagtccaccagagaggaagtgtccaggttcaggttatatccttaagattccagctggtgatccagaacagagttaactgactggcgtggtcttgggagataggctgggtttgggggaagagcatgagctcagagttggtgcacataggtcggctcaagctctgaggctatgggcaggttggcctccctgcacctcagctgccacatctgcaaaatggaaataatgatctgtctaaggttcctactaggccctcaactaagtgttggccccagtccctcctttatgaaaacagcttctttcataaatcccaagaacaaaataattaccattttgtatttctataaatattgtgtcatatgattcaaaagatatagcttgaaatgggctcatgaactgtttacagttgtcaacctctaatttttaatattctcatatcaactgtagaaaagggcgtggattttgttaattaaaattaattttgagtaatttattgaaagggcaggtttgatgctagtttacatctcttatactttctcaactcttagatgctttctttaaaatgagcatttctaaaattggagtgtgaaaaacttgccagcctttcttttttgctcctaatgctgatattgagggatggtgtcctcaaatcataatcactttggaatagaggtgcttagaacaaagctacttgttcccattaactttcacaaggctttaggaggccaagaactaaataatggttgtctgtgattcttaattattattctatttctttcctttttttttttttttttttgagaccggttctcagtctgtctcccaggctagagtgaaatgacatggtcatagctgactgcagccatgacctcttgagagccaataccgtgccactgcactccagcctgggcgacagagcaagactccatctcaacaacaaaaaaggagagtacagctaaaaagagagcagaacttcttttcagaaggttgacaggatagctcatgaaaattttgctgtctttccctactcctgagaatttctcaagcaagataatcctatagaatagttattcataaaaagctgtggctatggtcctaaatctggcacagttcaaccacggctacgtgatgagggtgatgatgattgtcattggcaaaactaaatcatttttatgttgcaaaattaggaaattaaaactcactattcatttgtaatgtcattcgtttcctgtatatcttgggaccttgttcttagaatgtttgttttagaactcaataaagtaaggtcacttaagttgaataacccataagactctctttttggagtagacatgcacatattttatgtaatacttaactatatgggtagcctagtcctgtagatattagagttaccacatgtaactttttcattccactgtccgagttaactcttgtgatctataaatccacataatactacgaacaacagggaactgctttcaggtcttaagcactctggacatttgctctgttagcatgtctcaaatttgaccaccaaaatgcttccaaagcagaaaagagagatgtgtacaacagatagatgggcagtgggttcttggggcaaggatagcattatcacttagtttatgaactagtggaacagtttaggtatctgggaattctttattctatagaattccatgtcctaaaatggtactttttgtctgcatgagtggaacaggtcaccagatagtttgtttcatcttgttaatgtcagttaagttcatgaatgtcttccagtgaacagcaagacattaagcaacgcttttggacagcacttgtaagagctttaagagaggttcaaggagattatagagttttaaaaagatagaagtcactgtataaattatacctcatatctcttaactaaagaaaatttaagtaccagtgcctaaatataaaatattaaaaacataaatgaactgacttctttgttagatcacattgtgtgtgtgtttgttcttttcagacatatgaagatccatgagaaggaccctaacagtgccacagccacagcccctccatctcctctgaaacgtaggcgattgtcctccaagaggaaactgagtcacgatgccgagtcagagagagaagacccagcaccagctaaaaaggtcctcttggctcccagtgcagattcacctgctcaggggacttctgtcagaaataccactaatctttattttctcagtgtggagacttggcagacatacatcctaagctcttaacgtgtgttttcccatactgtttctgtaaagtgtctaagaaaagagtaccagtgtgcacttcctcttgagcccctctgctgagcccagagatgaaatgaagagcttttacaattgtttccatgctttctacctgttttttctagctaaagcgcaagcttcataagcattcgggactcttttgtcctcacttttttattaccagtgcctggcagatacccggtgctgcaaaagtacttgtcaggtgggtgggagggtgggtggatggatggatggacagatggatggatggatggatggatggatggatggatggatggatggatggatggtagcgttctgggagtatttgttgtgtgaatgaatgaatggtcaggtccttaataatcaggattggataatgcaacccttgccttttattattgtaaatctctgaatttagcattggcctctcttccgaagccatcccatgtgggagaccttcatgacttcacttttttccttttccctcagatggtagaagacgggcagtcaggtgacttggagaagaaagctgatgaagtctttcactgcccagtatgtttcaaggagtttgtttgcaagtatggactggagacccacatggagacccattcagataacccactaaggtaggagaaagagtgaactagaccttgttcattcctgtttctcctggcatgtgacaatgttcttaagtcccgttactccacaccgggctccagtgattgaacttgggcacaacaacattagggaggcagttaagaaagtatcggtgtggggaaaaagttggctgagagttgtcagagggtggctgtatccacagggtgttcacatggttcactgtgccttctttctctcagcaaagccccttgagtagtcaccagtgagcccctgaacactggggagtctgctatcatgggtgttcttggacaacagatagattttcttcgcaaaagatgttgcaactcaaatgactattagcaatgcatgaatatgtggcccaaacagggacagcccacgtgttggatacccctggcacagcactggtccatcataggcactccgaagtgtttgaactgagctggacctgatagcacagaaacctgagaagccattttggggtcagagaaagttctacttagtgcaggacacttggccaaaaatggaacctgatatgtttcaataaaaaagtgacaggtgattgctctgccatccagcttcaattgtaggggcttcgcagctccagtgtttctgatcctcagccttgccaggcagaaaacacgggtagtgacaggacttcccacaagaattcaggggactcatctttctttctttaccttctctgataactcatcaggcaaccgttagttctgtattcttgatgagttgatagatttggaagttattcctagagaattgccactttaaaactgttaactgccagagattttaagcattggaaagaacaaagaactacttaggaacccctgttgtcgttgagagacttgaaagtagcccatcctggaagtcacacacagctgcagggtcacgagcacacagcagggccatacacgcgtgcagctttgggttttagaagacagcttgggaatgcaggaatttgggcatctgtttgcctgaatccctgatatatggaccagatttccttcttgaagacacatgtttagctgtgacttaggaatgggaaagtctgagcaagctgaagacttatgttatagggaaaatccaaattgtacagtaacttgatgccaggtcaaatatgattatccttaatcacattagcctgacatttttccattggtgagggaaaaaggaacttacgaagaatttaaactgctgaacaattgaagtgctataaaatgtctttacggaactccccagtctcaagaaattgcctgatcattgggttgggcacagactggttgtcaggcctagaccccactcctccctctgctcatacaggacctcagccagctacatctgaacctgttttctcatccttcaaattgaaggagggcaggaccagataatccttgtgttcctaaaaccttatttttatttatttatttatttttgggtttttttgagaaaagttttgctttgtcacccaggctggagtacactggcgcaatcttggctcactgcaacctctgcctcctgggttcaagtgattctcctgcctcagcctcccgagtagctgggattacaggtgtgtaccaccacacctggctaattttttgtgtttttggtagagatggggtttcaccattttggccaggcttgtctcaaactcctgacctctggtgatctgccccatcttggcctcctaaagtgctgggattataggcatgaaccaccatgctcagccccaaagcctgcctcttaacagttgttttattctgtctaccaggaaaaggcatatggcccctccctgtgtaggccctctagttctgagagatttgggaaacttcacaggttcaggaatgttcacagcatccccaggatgtgggcttgtggtgggtggcaaatactgaaatagttctctagatcaaggacctgagtgagcagagatgacattaccagctgaacctcccaaagagaatcatgagcagaggcagaaacagcacaggggaccccagctcctgctcacgttcctacccagcagccttcagagccagtgctgcagtgaatacaggctgtctctgagcccgtctgtatacttcatctcacttcatattttattctgtgatcagataccaccttagaaactattatttacccccttctagataattctgttctgcaggaaaaataatgtggctcccacaagagatttctgagcagtccaagcctgcatagcatggtgtgtggcagcgatagaggcagatcaggtgtctccttctgaaatgctgacctgggtgagggacgaggttctcctggagcaatcctctgaacaaggacctgctccagggagaggccaggcttcctctgcacagaggttggagatgggcattgcactggacgctcgtcatttttttcatagttgggatgggtaggatttggtgggtgattaatccacagtgatggtagggctggtgctgtagacaggctgtgaagttgaaccctcagtcctgcacgtccagctagccgacctagaggattttcctcacctgtttactaataatgccctgtgtttggtgaggggttggcttaacaattttgtaacctgacagggacttggcccctctgggcaggctctcacttcgctggccccacagctgtggctgaggggtggcccgtaagaagagagttgccaggcatcctttgtgggggcacacaggccacccctgccctgtgcctctatctataattgttgctagatggggtggggctggcatctggaaaccaaaaagagttgattacagaacatggttaatgtccctttgctcctctctgctctgccgatccccataataggctgctatcataggaggcctggggcagcctgcgccagcggggcctagccaggcggtgaactgggacagtagctagtgggagagacagcttgttaacccagaactaaaatagacaccagctccatttcaaatcccagaggcagcagaaccacagtgggatgctacccgcttagactgaaggtttgtaactcaaaacagctgttgccttctcactctcctgcacttatcccccttctccactccccaccaacactggcaaggtgcccattgttccttaataaaaagtgttggaaatccaaactcatataaatctcaactccatttccctccactccactgtgtttcaaatgaatgaagtgttgtcgtagaacaaaaggaagacacaaagctgcctgtagagatgccagctcttaggatcaggtgttagcttcaccctgacatgaccaatggtcagtcatcccccttcccccagggctccccagatgagggagagaaggcagaggaggaagcggagtcaggctatggcgagctggcgtttggaatcggaggtgagggacggagtgttcaagagagcaggcggctacacagaggacatcctttgtgtgaggatgttgctgggcattgaatgtccatcagaatagaactgagcaactggccataccctgctgtgaatgaagtcagctgggagaagcatccaggtcagcccggccagcaagagaatctgggccacgcacgtccttggaattttctagtagccgttttttatttcatttcatttcattttgaggatctcgttctgtcacccaggctggtgtccagtgacatgattatgactcactgcaccttgacctcccaggcttttaagtgacccttccacctcagcctcccaagtagctggaaccacaggcatgtgccgtcacatgcagctaatttttttgtatattttgcagagacagagtctccctttgttgcccaggctggtcttgaactcctgggctcaagtgatctgcccaccttagcctcccaaagtgctgggattgtaggcgtgagccaccctgcctggccctagtagtcatgttttaaaaagtaaaaagaaagagacaaaatgaataatgcttcatcgagtataccagtatcatcaaaatataatgtcaacacataatcaatagaaaaatggtgagtgatgtggttcacattcttgcttccatgtactgactctttgaaatctggtgtgtgtgacgtgaccccagcccgtcttggctgcaccacaccagccacatttcaggtgcttaacagcccacagagaggtttcagatgagccacctacggcagggagggctgcagctttgacgcggagccatgtcttgtgtgtgaagaaggcccaagggcggcagctggatggtcaccctgttggcacagccactgctgagggtgaaactcggccaaagttattgtgtaatcttagatggccccctgatgaaaggagttcgggtaataagtaacgttaacatcatttcagttaaaatgtacccagcaaatgattgagtttgtactgtgtgccaggcacttgcccaggcttgaaggaaagagtgatgtttgagacagggtacgggctaggcacaaaacaagctggttggttataaaacaaagttcaggggtgagttcagggcccaggagggcacatttccctcagattccaggcaggcagagggatctggtggatgcaaaacttctccttgggattttacatcagaggctgtggtgcttcacttaatttcctctgggtcagggcccaaccgggtctggtacttcattgaccctggtcatctctgagttcaaggtgatgacattaaatctctgttgggaattggtacatagggagcccaagggggctctgacaggaacctcggctccatgagtagtgagggcagctgagaccacccccttcctgtatcttagtagtggggccaccaaagggaaatgccttctttttcctgcattctccactgttccaaggaatgtttatctcccttcaccacacgcctaccacctacagagaccccaagactcctcatgtacccgggattgatcccacccttgtcaaatgtcatcctaaaaacagggaaaagataaaatatttgtcagcatcttctgttgaagagtctgtgagtctgaggcttgggcaggcagaaacagattttaaacacttccgggggctatgaacagaggtccctcaaggaggggaagactgcccccacccctcacctgacaggtacagaagccttggtcaggactaccctgtcccccacccaaggcccagagcaaggagtggcccacccagcttcggtagccactacacaccctttgtgaagtccctcagactctgcccagtgcttcacgccacgctggtttggttgaacagtcagagcggggcattgggttgctgtgtgcagcctgggcgggttcctgggtcatggggagggacggctgcctggccagggccctgtcacagggccatcactgttgctcgcagcaactgggagagattagtgcagctgtcggatgtcagttctctgccccgagatgggcaggggagggtgggctgaggagagaagaatgtgtgagttggttgggactctagaggagaggttgtttgcacttactccttctggcctctggagacagaacaggaaaaatgaagcatgaaatcccttttgagaaggaatgccagtctctccattaaaacacaataatgaggaaggaattcagtatctgaaggaaatggtcaagctgagtggcagcttctcggcaggtatttcgcaggttcttctgatgagggttgcagggagcagggagtgtcagcattaggaaatgctcccagctgagccagcgtccaggcattaaggatgtgtgggtcacataaggagccagggcatctgcaaatagctgtcctctgaacgcacagcctggcagagtggaacgaagccagccggctccgtcccagcctgccgcctggcagctctgtgacctcgggcaagtgctgacttggtttccctatctggaaaatagatttgaaggctgttgtgaggatgaagggagataatccacaatcctcagagtgtaacaaatactaaatgaaatttttcttctgatactattatttagaatgtattttttatataaaattttatataaaattaaaatttttagatattttaaaccttccaacatttacagttataggtgttgtggcactctatggctatcccattccaatggaattgaaaaggagtcaacttccaggtgcgattcacttggcagagaacatgaaagcaatttgtcctttactcttataaacagctgtttttatctagttttcgcttttgtaaagattgggaaatggagtggctctttaaatttggtttgagtcttgcttcccacgtttcttaatcccactgtgtgaaaagcagatatttagaaacgtgaaggaactcgacacctttatgtaacagaacaacacatcactttctttagattgttgggggaaccctagggttctaaggaagtgagtttcctgatgtttgaaatttgccaatgcagcctttcaaaaatatgcttagcatagtttaaaaaaaagaaaattcacccttcttgctgattgtgaggaggtcagatatctgtccctcagctgtcacaatggtagacttgatggagttacatgacagagaagagagcccaaggaagcacctgagtggtttctcatctctgggccactctgttaaggcctgtttgttgactttgggattttcatcttattctggagagttaaggtcgccagatgaataaaatactactgttagtgagcactgggggagctaatcccaaaactgtttagccacaaggttaagaagttaaaaaaaaaaaagagacttttggtgtccttgttttccatttctgtaaatcacattgctgataaatttgcctttgggcatgcaccctgcccattttaggtactaggctcagttactggctacagattgcagattcccttttcagggctgatgcttttaacagtgatagttattcctgataagtaccttaactctgctgtgaggtatcaaaactgctggatctatttttggctgcctctttaccattactccctctagagaatgtccataccataacaacatatttacatatttatcacactgcatttctatcccagctcagaattgtgcaactttctttaaaaaaaaaaaaaaaaaaaaaaggatatcctgtcttcttccaaggacatttgctgtcagaagaacagatatctgtgccctgcctaaataggcagactgtgtagcacagacagccattaattcaatgctttttaaaattttagggcctcacggtggctcatgtctgtaatctcagtactttgggaggccgaagcaaggggatcgcttgaggtgaggagttggagacccgtctggccaacacggcgaaactccatctctactaaaatacaaaaaaaaaaaaaaaaaaaaaaaaaaaaaaagccaggcacggtgtctcaggcctgtaatcccagctactggggaggctgaggcatgagaatcgcatgaatccgggaagtagaggttgcagtgagctgagatcgcaccactgcactccctcctggctgaccgagtgagacgctgtttctaaaataataaaaataaaataaaattttaatttacttttgttttcttaagacttagtgaatctgagtgtgaataagaacattatttgttgtattaaagtcccttgaggattgaaaggacaaaaccccagctagcaactgagtgtattttcttgacctgttggagctggttggtcccacccctcgccctatgtacctcctgcctttggtgactcaggcacgtggtcaggcagtggctggcgggttgggtctctgtgacttcaggacagcgtggagttcaccagctcgtgtgggagtcagacttctctgaccatgttagcgctgtgccctttccagcccagcaagggtcagagccagtatgctgtgggatttggcttgtctgtttgatttttggaaaagggacagtaagggctgtgacagtgcctgtgtagtcactgacaaccacaggcacttctctaagcacatatcagagactctctgtgatcgtggttcccggcccctggtgttggcagccaccttcctgccatctgtgcctttacataccaggggccatgtagaaagagcttaccttatgacctgggagtcgtcttcctccactgggacccccagcccttctctctacttcaccctacccagtgccgccagggacattacagttgatactaagggaggaaggaagggatggaggataagtgcaggcagctgcttcacctctgctgttccagggagccccaattccacacaccccaacaccacagccccctcctaccatctaccctgagaactgctagagcccctccaccccataataggaacctccacagtggagcagccccactggaggcaggacccacagttcagcgactggcgtgtcatacagggggtggggaatggtccaatctactccagcactctaaagtttcttatcctcttacagaaacactggccaacgtgtgctagaatgcaggtgttttctgggtgaaacaggctcttgtgcactgtcttggtacagaaacacttatttctgtgagcagtgatttggagttcacatatgctaagcagctcctgtaagttgaggtcaggctgaatgtccattttggattccgtgtgtaatctaaccttaatctgtcatttggagatttttccactgatgattttttttttcttcctaaaagtaatgtagtgtgattttaaaagaaaaagaaagttttgtttttgaaagggtcagtggggttttgttaattttctttaaattctacaaagagatacacttcccccaaatacatttactttactgacagcaaagttagtttccatttggaaaagttatcctgtttccaacatcgagttatctctgttgccagaaaatcaaaaggcagccaatccgatttgtaaacctttcctctggcacattgtcaagatctcttgcaaaacgaaattgtcctacagccctcccctctcctgtggctctaagtgcagttctgccccatctaaatattaatattttgcaatcgtgctctttatgagcccctggcagagtggagatacgccacagacgggttgaggagagagtcgtggggaccacctggccagtggctgtggtcttaatggagattgacaagcccaaaggaggtttgcaaataccctgatgcctgcagccggctttgcatccagcagctccctccacagatttacagtggcctctattgtccttgaagagctgcttagaaacaaggttgcaaagctttctccttggggccttgggaaggctggatgaaccctcgcgtctccacctgatagggctgatccaagtgtttctgggtggtggttttccacactggttttatttaaggtctatcaacaggtgctgagtgtgaggcagggaggcaagtgtttttctttttttttttttgagacggagtctcgctctgtcgcccaggccggactgcggactgcagtggcgcaatctcggctcactgcaagctccgcttcccgggttcacgccattctcctgcctcagcctcccgagtagctgggactacaggcgcccgccactgcgcccggctaattttttgtatttttttttagtagagacggggtttcaccttgttagccaggatggtctcgatctcctgacctcatgatccacccgcctcggcctcccaaagtgctgggattacaggcgtgagccaccgcgcccggccgcaagtgtttttctgtgggtgtttcttccttttaaccagctgcaccacatgcttctggtttcaaagcagaaatttcttctctgccactttcatgttttatgtcttttgacttataggagtgccttagttgaaattccatgaaaagggtgtgaagtgtggatcaccttgcttagactctgttaggaggttgagtgcttgtgcaggctgggagagcatgcacttcttttcaggaggcaggtgaagggagcaggtgggatgaggcagaagactggccagaaagaacacttttctccccatgagttttgcagttagacagaagtagtaaggacgattgtgaagttcttgaaagtgagaagagagaacatgttcctttgaaattaaaactcaggttttcctgatttttcacgttagctaaaacgtgccaggaaacgggcttttcctgatttctttttttccctagtacaataacataatgactaaatttggaaaagtactttgcagttttcaaagcactttgttattcacagtaactgcagagatccccccgttttagatgagaagggaaactgaggtgtgaagaaggaaaggaacaggagagaagtgacaaagatgagtaaagtattggtaatttcttttctctgggagttctaacattctaacaggcttgtagtttaagacgtttctagatagcagattctcacacctaactcactatattttccaaacttatctaactataagaatccgctggtgtgcttgttcatatacagattcttaggcccatcttctagttattctgatttcagttggtctggggtgatctaggagtctgctttttttaacaaggtcatgtggggattcttatctcttggcatgtttgggaaattttacatagccggcagctgaagtgcacatggaaataagttgtccaaggtcacgcaatctgaactccctgatccccacctggtgtctctggtccctgagcccacatccccctaccacccactgttccacagctgccttcccagggacacagagtttgtgatcaatactgaataattctgccacgtctttattgtcatgccttcatcacctactacgtatgaaggtgtccagaaacaggagggatttaagggtgagggagagaatgaagaagacagacacaggcataagagacaaaaagaaacctcaatgttattaaaaattcaagccaggtgtaggggtgcacacctgtagccctagttactagggaggctgagacgggaggattgcttgagcccaagagttcaaggccagtctgggcaacatagcgagcctgcctcaaaaaagaaaaaaaaatcactacaaccatagaggtgcagtaaattctaaatctaattgccatattaagaggcattcattctccattcccttcataaaacctacttattaatgccagtcacactaaatattcataaccaataggctgtgcactagtacagaagtctcaaaagtggagagtagccaagcacagtggctcacacctgtaatcccaacactttgggaggccaattcaggagcattgcttgagcccaggagttcgagaccagcctaggcaacatggtgacaccatgtctctacaaaaaattttaaaaattagccaggcatagtggcacatgcctatagtcccagctatgaagggaggctgaggtgggaggatcacttgcgcccaggagttcaaggctgcaatgagctatgatcatgccactgcactgcagcctgggcgacagagcaagactctctttttaaaaaaaaaaaaaaaaaaaaaaggccgggcacgatggctcacgcctgtaatcccagcagtttgggaggccgaggcgggcagatcagctgaggtcaggagttcaaggccagcctggccaacatggagaaaccccgtctctactaaaacacaaaaattagctgggcgtggtggcgcatgcctgtaatcctagctactcaggaggctgaagcgggagaatcacttgaaccggggaagcagaggttgcggtgaaccaagattgcgccattgcactccagcctgggcaacaaaacaaaactcttgtctcaaaaaaaaaaaaaaggtgaagagtattcaggaagatctctaggatacaaggaaaaaaatatattttttatctcacccttttaaaatgtctatttggtaatgtgcctggcacattacatatatgcaaatacatatgtacataaatacatatactacctacgtacacacatacacattctcagctaaacaacaaacacatgtggagcacatacgaaaacttttttatagaagcggtacacatttcagaaagtttgcagccacctctcagtcctacctgcctgccttttgcagttgacttgtatgctacgaaaagtctcttcccaacctgtttatgtctgtaatacttgtaataatttcttataatttaattaaattttatataagctgatggaatgttgttttaataaaagaaaagaatagtctctgtggaaacttatgttggaaaggcttagttacagtgcagattggacagaatattttttttttagttgctgtcaaatttaggctaggtaagatacctgtgcacagttgaatgccataatcgtaaaaatctaggattctgctttagtttggcttgcaaaattctggtataataaactcgatgtacccttatccagtttcagggattatcaactcacagccaattttgttttctctcttccccaacccaggtaatttcaaaacaaatcccagatatcctatgttttatttataaatattgcattatatatctttttttaaaaggaacctttttaaaaagcatagccaaaatattatcataactaaaaaattcagtcacttgtgaatatatcaaatatctctgatcagagttagattttcccaattcagacatatctcttatcctttcagtccaatatagatctttcagccaagtggtggcgaggtgatggattggcgaccatggggagggtgcaattgaacttgagcatgggggaaatgaagtgggggtgggagaaggaaggagctctatctccaggacagaggctgttgttgcctccaagggtcactgtcctctctgtgtgcacagctcagagcttgaacgtatttcagccagaaagaacctcacccagaggggctgtgtccattctgcttccccgcaggatctgtctcatggcctgtgatttagaccgctgggtactttgacatctgggcccgcagtgtgaggacttccagcccctaaaggtgttcttcattatccagatctgtcccttccctgggccttgaccacagtggtgagctcagcagaattccctcaaaaggaactctgtgttttgagtggctcatgggaacccgggtttggggttccaaaggtagctgagcagtgacaggagagtgctcaggagaggcccttcctgaacaggggagccaggggaggagcatgcacagcaggaccgggttctgctgtgcccgctacagcgcgataaggcaagcagggcggcacatactggcacttcttcctttcagtgcttcctgaaagtgagcacagctgcttcgtggctgacttcgttatctctttatttccagagaagactctcaactcaaaaaagttttcactgatgtacatgcagtgtggacgtaagcaagtggctttgcctggctaaaacagtgataaaaggagctaccttagcggtggtgagggtcagatacgcttgcacacataaatacatggaatgatgctcggtatacagcattgtccaacagaatatcctgtgatcttggaaacatactgtgtctgtgcttcccgatgcagttgagcccttaaaagaaggctgaagtgactgaggaactttaatttaaatttgaatagctacatgtggctttggtggctactacattccatgcaagtctaggggatgttgataataccataacgatggtattttgtttttatccacccatctgcacactgatgtaaaatttttaatatggttctcagtgaagacctagaagacaatactggtctgaaaagcagagacaatattataaagtggtgtttgctatgcatctgtgtggcccagaacatttaggatgtcaaagatcatctctgaaatgaagggtcagattttgaagtggactgcctctgtgggagtctttcaaggaaggggagacagccttgtgataagcatgggtgggagcaggaactcaggctgacattttgtgtgtgcttcttactggctgtggggcctgagtcacatcgcttcgtatttttgatcaccggtgttcatctggaagatgagggtcatgatacgcacctgcctgctggggttgtcatatgtgctgagctgtcagggcgcctgggctcagtccatgaggaccatggttatcattcagataatgatgatgctaataccacaacttaatgcacaatcaccatcacttctaattagattggaaaatttaataatttttatccctatcagatgccaaggatgctgattgattgccctagatactacttaaatgtatgctcttctgacttttaaacatttacaataattagaatccagtgaactcagggagagagaaacctctgacatgatcccattaatgcctgatcgaggcgagagcgagcaggtcggccatggtggcttcaggatcccagctgtcttcttgtgctcagactgtgggtgtttaggtcgtacgtacaccttgtgctgcctgcaaagatttggtatccagaagttgatagaatacaacttttttaaaaggaagaggtttttggtgctaaccatgcagcctggcttcttgacatcatatcatttttattttactcaattgaaatgaatcaacaaaaacttaagtctggaagagtggaaactctgacttaactgcttcctcatatgctctccctttctgcctcatatgttctccctttcctctcctagatgtgacatttgttgtgtcacctttcgaacacatcgaggactgctgcgtcacaacgcgcttgtccacaaacaacttcccagggatgcaatgggcagacctttcatacagaacaacccttcaattcctgctggcttccacgacttaggattcacggacttctcctgtaggaagtttcctcgcatttctcaggtattctgatcagcccatggaagcaaccagcaactgccttccatggtccacacagttagaccatgggaacttcctctcctcagggtttctttccttaaaatgtcggttgggctttgtctttttttgtaacaccttttttcttaaaattattgttggccctttcggtctcccttgggttgttgggttgagaaggctgcataggcttgtttggggttgaatatcctatgaactgtgcatcagtctagctcttctgtgccttttgtccgttcttgggtctttgaggtttaagttgtcagttgtagaccaggccccagtggctcacacctgtaacgccagcactttgtgaggccaaggcaggaagatcatttgaggtcaggaggttgagacctgcctggacagcacagcaagactttatctctacaaaaaatttaaaaattagccaggcgtggtggtgtgcacctagtagtcccagctacttgggaggctgaggtgggaggatcacttgagcccaggaggttgaggctgcattgagccatgatcgtgccactgcactccagcgtgggtggcagagagagattgcctcaaaaataaaataaaattttagggccgggcgtggtggctcatgcctctaatcccagaactttgggaggccaaggcagtcggatcatgaggtcaggagttcaagaccagcctgaccaacatggtgaaaccctgtctacactaaaaatacaaaaattagccaggcgtggtagcatgcacctgtaatcccagctactcgggaggctgaggcagaagaatcgcttgaacccgggaggctgaggttgcagtgagtcgagatcgcgccactgcactccagcctgggcaacagagcgagactccgtctaagaaaaaaaaaattttttttttaaataaaataaaagtggtgaattgtaaaacaccccagtcctatgataatcggaattcgtgggattttaaaaaaaaatctttctttactatctgcattgcagctaaatattccagcgttgtggtttctattaaaaacaatttgggtcattattgacctgaataagaaaagagccatatatattcactgctaataaagcacctgctaaaactactttgaaactggctgggcacaatggctcatacctgtaactccagcactttgggaggccaaggcaagtggaacacttgaggccaggagttcaagaccagcctggccaacacagtgaaaccccgtctctactaaaagtataaaaaattagctgggcatagtggcacatgcctataatcccagctgctggggaggctgaggcatgacaatctcttgaacccgggaggtggaggtcgcagtgaacccagatcatgcctgggtgacagagcgagactcagtctcaaaaataaataaataaaactaaaactgccttgaaattatttttttccccattttaaaaagttgagatagaaggtatcaacagtgttgttgttcaagtgtacaaggtacaaactcaatggattgttccatatacacacacccatgtgtgtgcaccccccaggagacattcctcatagaccctcctaggcagcatcccccttccacaatcatagaggggtagggtagctgattctccaacatctctggacctcagttttgcaaggcacccacttttacaaagagaattaattctacccttgtggtattgttacttaactatacttcagaatctctagtgagataccctgtgggttgatatcagttatcacgcaaacatgattcttaagatgctttgtggatttccttattcagtccagtgtgttagcaagcaggagaaggtcaacttttttttttttttttttttttttttaaggcagagtcttgttctgttgcccaggctaaagtgcagtgtggcataatcatgtgtcacttcagactcaacctccttaagctcaggtgcttttcctgccttagcctcccaatagctaggacacaggcatgtaccaccacatctggctaattttcttatttttttttatagagacaaggtcttgctatgttgcccaggctagtcacaaactcctggcctcaagtgatcctcccgcctcagtctctggagtagctgggactagaggcatgagccaacacacctggctaatttttttttattttttgtagagatacgggatcttgctatattgcccaggctgggaactctttatgttatggggaaaggctgtgtactgggataaatgtacaacaaatactttgtgcatctccgtttagtgattattttttcaatcttcacatgtgttcccttgcttttaccggtgggttctatataggcctggtgcgaaacaaacctgcggaggtgcatcagcgagcaacaccgttttgtctgcgacacctgtgacaaggcgttccccatgctctgctcactggctctgcacaagcagacccatgtggcggcagaccagggtcaagaaaagccgcaggccacgcccctgcctggtgacgccctggaccagaagggcttcctggccttgcttggcctgcagcacaccaaagacgtcaggcctgcccccgccgaggagcccctgccggatgacaaccaggcaattcagctccagacactcaagtgtcagctacctcaggaccccggctgcaccaacctgctgagcctgtcacctttcgaagctgcttccctaggcggttctctcacagttctccccgcgaccaaggacagcataaagcacctgtccctgcagcccttccagaagggcttcatcatccagcctgacagcagcattgtggtcaagcccatctctggcgagtcggccatcgagctggcagacatccagcaaattctgaagatggcagcctcggctccccctcagatcagtcttccgcccttctccaaggcccctgccgccccactgcaggcgatcttcaagcacatgccccctctgaagccaaagcccctggtcacaccacggacggtggtggccacctccacgcccccgcctctcatcaacgcccagcaggcttccccgggctgtatcagccccagcctgccgccaccgcccctgaagctcctcaaaggctcagtggaggcggcctccaacgcccacctgctgcagtccaagtccgggacccagccccacgcggccacgcggctctccctgcagcagccgcgggcggagctgccgggccagcctgagatgaagacgcagctggagcaggacagcatcatcgaggccctgctgccgctgagcatggaggccaagatcaagcaggagatcacagagggggaactcaaggccttcatgacagcgcccggcggcaagaagacgcccgccatgcgcaaggtgctctacccctgccgcttctgcaaccaggtgtttgccttctcgggggtcttgcgtgcccacgtgcgctcccacctgggcatctcgccataccagtgcaacatctgcgactacatcgccgccgacaaggccgcgctcatccgccacctgcgcacgcacagtggggagcggccctacatttgcaagatctgccactaccccttcactgtcaaagccaactgcgagcggcacctgcgcaagaagcacctcaaggccacccgcaaggatatcgagaagaacatcgagtatgtgagtagcagcgcggccgagctggtggacgccttctgcgccccggacaccgtgtgccggctgtgcggcgaggacctcaagcactatcgtgccctgcgcatccacatgcgcacgcactgcggccgcggcctgggcgggggccacaagggccgcaagcccttcgagtgcaaggagtgcagcgccgcgttcgcggccaagcgcaactgcatccaccacatcctcaagcagcacctgcacgtgcccgagcaggacatcgagagctacgtgctggccgccgacggcctgggccccgcagaggcgccggccgctgaggcgtcggggcgcggggaggacagtggctgcgctgcccttggtgactgcaagcccctcactgccttcctggaaccccagaacggctttcttcacaggggccccacccagcctccacctccccatgtctcgatcaagttggagcccgccagtagctttgcggtggacttcaatgagcccctggacttctcgcagaagggcctggccctggtccaagtgaagcaggaaaacatctcctttctgagcccttcttccctggtcccctatgactgctccatggagcccatcgacctgtccatccccaagaacttcaggaaaggggacaaggatttggccactcccagcgaagccaagaagcctgaggaggaggcggggagcagcgagcagccctctccctgcccagcacccggcccttctcttcctgtaactttggggcccagcggaatcctggaaagccccatggcccctgctccggcggccaccccggaacccccagcacagcccctgcagggccctgttcagctggcggtcccaatctactcctcagccctggtcagcagccctccactcgtgggcagctcagccctcctgagtggcacagccttgctgcgtccactgcggcccaagcccccgctgcttttgccaaagccccccgtgacagaagagctgcccccgctggcctccattgcccagatcatctcatctgtatcctcggcccccaccctgctgaaaaccaaggtggcggacccagggcccgcaagcactggcagtaacaccacggcttcagacagcttaggaggttctgtccccaaagccgccaccaccgccacccccgctgccaccaccagcccaaaagagtctagtgagcctcccgctccagccagcagcccagaggctgcctctcccaccgagcagggcccagcgggcacgtcgaagaagaggggccggaaaagggggatgaggagccgaccccgcgccaacagcggcggggtggacctggactccagcggggagtttgccagcatcgagaagatgctggccaccacagacaccaacaagttcagtccgtttctgcagacagcggaggacaacactcaggatgaggtggccggagcccctgccgaccaccatgggcccagtgatgaagagcagggcagtcccccagaagacaagctgctgagggccaagcggaactcgtacaccaactgcctgcagaagatcacctgtccccactgtccccgggttttcccttgggccagctccctacagaggcacatgctcacacacactggtaagagggccaccgggctcccaggcagtgagtcctacttcctggtagggggagccacgagtgggggtcaaaagcgagacccatctcccacagttccagttattcctagcttggcttcttccccggtctccgaagccccgagcttgtctggtggtgctgtatttcctatgtgctctcagtacccacatggcctttgtgcaggggccgagccctccaagggcagcattctactaagtgttcatccggggcgttttgaggtgaaagtggtcacaggccctcagatcactcatggcgtcgcctcatcccttccggaggtggtagccagattatctgctgggttaaacagggaggcggctccacagacgtgagactttgtattaaggtattggggcataatgagctcggtgctttgacattccattccagtgtcctcaatgcagctttttaaattttgacaattttgtgaagtttttttggatgccatgtcttcttaaagagaaatatgacaaattgtgaggttggctgttttctttcagttcactaaggcagtcacatcttcccctgttgattgtgaaaatcagcaatgagtggtggtagaatgttttaaaatttctgtttatactacaattgtaagcctttctgagaaacttctctcagaagggcctggcgctggtccaggtgaagcaggaaaacaactccttcctgagcccttcttccttagccccctacgactgctccatggagcccatcaacctgtccatccccaagaactcacacccaagtgtgaaaaaattctaagtaacaaacttaaattgtcaaagtgataccccaaaagtatcttccttttttctttttcttttttttttttttttttaaataaaagagtctcactatattgctctcaaacttctgggctcaagcagttttcttgcctcttcctcccaaagtgctgggatcacaggcatgagcccccacacctggccccaaaagtatttttctttttttgagacggagtctcgctctgttacccaggctggagtggagtagtatgatctcagctcactgcaacctctgcctccctggttcaagcaattctccctgcctcagcctcccaagtagctgagattacaggcatgcgccaccatgcccagctaatttttgtatttttagtagagatggggtttcaccatgttggccagactggtctcaaactcctgacctcaggtgatctgcccaccttggcctctcaaagtgctgggattacaggcgtgagtcactgcacctggcctgcccaaaaatatttttcaaatgttagtttctagaagctgatttttaaagagaagtttaggataggaatatactttaaataattttgttatcaggtgcttctagtatataaatggccatacaactctcatctgaattataattttctaaattttctcagtgaacagtctcagtattcagtgatttgtgttattgaactaagcgcaaattagtgagatcctatctttttggagtttacaaccaaaatattaataaatagatagggcctaaaaccaaatggtactggattggtgaataaaatacagaacaccagttaaacttgaatttcagatagacaacaaataatttttagtataagtatttttatgtagttcttgggatttactaaaaaattatttgtttatccaaaattcaaatttagctctgggcatcctgggttttttttgtgggtttttctttttgcgctaaatatggtaacccaaggtagtcaggaggtttatgacaggatgttgagggtgggttgtgggaattggtgtgagctgtgctctgtgtccaggtggaaatgcattcacaaagctttggagaagctcgtggaaggatgtttctcctagatgaggtggaacagcaggagggaggtcatggagccaccgctggatacctgaacagtgtgcagaatggagcctggggagggagaggaatctgggagccagaggggagttgtggctgggagcgataggactctcagtggctgcactggtcaccagagcttgccacacagacacggcatttccttctgctgtggtgggtccttgaatccagggattgaggagtagcaagtcaggagtgcctatccagggaggactcaaggagaaccaggatttctagatttgtaaagtatgtactgccctttcataccactgtctccctgttaaaatagtttaagcctgacaagtaaagcaaccattctaatgatgacagcagttcagggaagaaaatgcatcttcaagagaaggtgccccttatagcaatgtcttttgctacccttttttgggtgccacctgtttatcgcctactgagagtttatggagaagtgagtctttctgttaccacttttcagaaagcagatggtctggatctgatgattggcttggctcgcccccttcctcggtgctcccacctccccctgctgtcacccaacctccccatcttcctcttctagtattttcttttttaagagttgtgcccatgtctttgcaggtgcctgatatgtgttcccatttgtgaatccagtcatgattgcctggcttttgaatgccaaaatgtcagtgttggtttaaaatttagtagcatctgaaactgagcaagaaagcaggaggtttgtttaagttaggatggggtagatataaatataaacattctgcctcttgtcccttaaaagttattgataaccttgatagatgtgtctgctttggcgcagtccctgtatcctaccataatatgttcttggtagagctagtcttcatgacaatcctgtgagggtgatgtcatccatgtgttgccacaaggaaattgaggtttacttttaaggagctaagtaacttgcctacagccatatggggaataagagatggagctactgttccaagccagggtccggttctgtgcaactgcccactggtcagggtgtgtgtgcccagtgtgtcctctgtgtgaaggcagaaggcgggcagagtgcaccttccatgtctccctgtgttcccacatgtccacattgcagaaggtttggaagtagtttgagataaggggggacaccactgtggatcagaatgttattagctaatttcagacttaatgactacagaatcgtgttagccacatgcatagacactgtatgaaggttggtgcccattgagctccattaatttcctttgctgggcttcactctcagcttccagggatgttcagcatcaccactgctaaatcatgttatatggagcacttggctacatccagtgtcgtgttagagcattttccattcacggagcattagagctggaaggagcctgggaagtcacctgatggcccctcagcccacagacctgatctttctcctggtaggcagctctgctgtcactcagaaccacatggatccttggctccctaggcttctgtgaggcgctgtctccaaaactttgaaaaaagtcttgagtgtacacatgttaaacattgactctgcagccaccctgcaaacaaaggtgttattcggagaagatgttctgtggggtatttttgttttttctagttttttgcttttgtacagacaaggtctcaccatgttacccaggctgttctcgaactcctcagctttgcaaagtattgggattttaggcgtgagccacggtgcctggccgttttgtgtttttgagtacagtgttaaaatctagctgagttccagccagaagcattgagcagcatctggttttggactgcatttaaacaaactgtctacaccttgaatgctggcctcctcctaccccctcagcagattactgtactgtctctactttgtctcaaaacacgtgttctccagtcctcccagtcctcaaaggggcagcaagaagcagatccggtgttcagtgtccaacgaggggtatacctgctggctgctggcaaggagcatgtggcctcagccttttcttgctcccggctcaggttccaggaactgtgtttgatgaggaagctggcagggctgtcatttttcataccccctggcacagtctccacacacacctgcctttcctccttccttccactcctctccagctctctcccagaccatactttcctgctgatgaggacagttcctggttccttacctttctctacctaaacgcgccactccataggagacaagagtgcactgttcctgcctttacccctcgggagcatctcgtgtgtttttaggccacaggtggaggagagggtgccaggaaacacagccagtctgttctagcctctgtcctcattttcttcccccttccctttgctccagttccttgtcccacagtgatgggcttgggactatggggtgtccattccgggcttccctggcttgcttactttctcatgggtgctttgagcgccttttttgagccggctcaggctttccccccacaccctttcctccctgcttctatctggcagtgagggtcagagcttcggtcagtgagtcatccaaacctgggtgtggaaagcacctgggacaccacttgtatttggctccttttagctttcttaaaagacagctttggccgtttgtacccagtcctgtgtacacttctgccaaatacagagagaaaataccaaaagaaagaaacctgcctgcaggggtggaggagcaatggagagaaggctgggctgctcaggctgtcatcttgttacaaaaagaaaagcaactgcaaggttttctatgctagttagaccccacctttctaaccctgattgtctttgaaaaatgaacagaaatgttttcagttctgtttttttttttttttatcttggaggccaaggccccaatctcctcatcaaactattctcactgttcactcttctcttgccccaatgtccttcttcgtttcttgactgttctgggagagtaaacactggctaattttttttgtttgtttttggaggtttttttttttttttttttttttttgagacaagctctcaccctgtcacccaagctagagtgcctgtgtgcaccctggctagagtacagtggcatgatcacagctcactgcagccttgaactcctggctgagttcaagtgatcctcctgcctcagcttcccaagtagctgggactacaagtgcacatcaccatgcctggctaatttttttattttttgagacaaattcttgctctgtagctcaggctggagtgcagtggcgtgatcttggctcaccacaacctctgcctcccgggttcaagcgattctcctgcctcagcctccagagtagctgggattacaggtgcgcgccactgcacccaactaattttttgtatttttagtagagacagggtttcaccacattggccaggctggtcttgaactcccgatctcaggtaatccaccagcctcgacctcccaaagtgctaggattacaggtgtgagcctccgtgccggccttttttttttattattatttgttatagagacaaggtctcactgtgttgcccaagttggtcttaaactcctgggctcaagcgatccacctccgttggcctcccaaagtgctgggattataggcatgagccactctgcccagctggctgatggtttaagcgctcgcgttggggcttgcagaatgctgtaggtcctgagtgcgcaggtaactcactgtggttacaggtgcttttacaaatccccttctaaagcagttattcgtggcagctaccaaataaatagaatcatttgctactttctatatagatggctggccaacaagtgtttttgaaacctgcgttattataaaatactaaacgggcccgttttcctgcatccctgcaatccagagagcccaccactatgtaaaaatgtcagacttacgcagtgaaatgtgagcttctaatgactcatgtgagttgttatgtcactttgggagcctttgtagtttgatgcaatactttcacatcatggattgttttctgaatttagcattaatagggaccttctcatggggacgtcagcctggcagtcctaaccaactgtaaaggtgacgcacttaccagtgtgaaaattacagagtaaaccatgtgacaggggggagcgagaagccgattgttttctttgaaatcaagaatcctatcatagtagcttcttacttgttttcctcttggcccagttcttttctcaatctggccagactcagagaagcagcagtgttaccttttgacaataaaatgttaaaagtactttatttttacttgaaattattaaatactgtgttcaattttaaatgaaaaacaataagtaatttttttcattttattttatttttgagacagagtctgtctgtcgcccaggctagagtgcagtggcacaatctctgctcactgccacctccgcctcccaggctcaagcaatcctcccacctcagcctccccagtagctgggattaaggtgtgcaccaccatgcctagctaatttttgtatttttagtagagatggggtttcaccgtattggccaggctggtcttgaactcctggcctcaagtgatctgctcaccttggcctcccacagtgttgggattacaggcgtgagccaccgcacatgaccacaagaagtaatttggaagacgcaccatgaacactgacatactgtacaactagtcacactttttttttttaatgtggatgttttaaaaataaattttgcagaaaacacctgcagaatgatatgaggagaccctgaaaacagtcagtggggttctccacttttgttcaggttgccttgtggagctactcagaagcacacaggccggatttctgggtgtctgattctgccctttccgggtttctaattctgttgtctttgattgttgcatctttattcttaaaagcgcctgaggagatttgtaagcatcatcttaaagggtcttttagctcaggagggaatcaatgtcccctgtctctgattattactcctgatgtgaaattgtggccatgctgtcatgggggcggtgccaggtccacaccttcaggctctgtatgaatggcgccccctggagtcgtgtgacacagccagtgccggttaaggctagtccctccttcccctgggaaaacacgtggcccctctggctggtccccaggtgccaggcccttgctgtgcattcacaggggagtgcgtggccttgggcacctgcactagttcaggcttctatcgacattaatctaacgccagaggcccctgtgatctgtgtttccagggagctgtgtttaattgtggcaatcctagggttatgagacaaaagtactgggccccagctctgaagtcatgttggttaacacacaaaaccttttaccctgtaacattagcaactgggaccttggactccagcaacttgggggaaagggaggaattcagtgatacacaagtgatgcaccaccaacttccgcctcctgaaggcccctgatcccctccctcctcctctcttttcctctccacctcctttttcccttgtgctttctttctccctcacatgcatccgcacaaacccaggacaagttgtagaggagcttctattgcattttgaaacatgatgtttacagcacaaaaggaatccaagtaaaaggagagggtaggcagaccaaagcaggaggggactgtgcctctctcagtggctcacccatctgtgcgtttgggatgggtctaggggcgaggcagggctgccaaaatgtcctcttcacatgcacatctgttgagtggagcacatgatcaaatgcagacatagttacgtattggtcactcatttgcaaccaagcttggagcagggggaacaaagaacctttaatgagaagatctcctgactgttgccacctaggaccacagtgaacttgaacagaggtcactgcaggatgtctcggcaagtcagacaggagttgtcctgggaagtcagaactcactgctcccgttcccctgtgggagggacacagccaccaaggccaggaagggggactggccaccctggctgggggctgtccctgacttcttctcttcatgggcccccaaagatacccaggggttccccattggatttcctagtgtccatattacggtgtccttgccacactagaactcgttagagggcgtctttctctttgtgatagaatataggtgttttcttgctgtgctctaaaatctcttcattcgcttttttttgttgtcgttaatattttaattgtaataccgttgttttactttaaatgtatatttttcagtttcatttattttagtattttgaggacaaaaattcatattccattcaacttaggaaaagggagaatgatcattttagtcattgatggtttttttttttctaatgtgttttgttaattttcttgaagggatggaggaggggggaacaactgccaatgatcccaggagaataaacaaaagcgacttttctatttcattgcagtagaaagccagataaatatatattttttttcctgcttcaggtcagaaacccttcccttgtcaaaaatgcgatgccttcttttctaccaaatctaactgtgaacgccaccagttgcgcaaacacggagttaccacctgttccctgagaagaaacgggcttatcccccagtcaaaagagagtgatgttggatcccatgatagcacaggtagtgccgccaggtgaacaagaacccaggaagagggagagagaggagttcggttaagaattgtagcaaactccagtccgagctgtggaggggctgcttgttcacttctctgtaggattcagagcccacagcctgttaatagaaaggcaggccctgctgatgattgggagggagtataactcctgggtcagatcgcctagacagacagcagaaaacagtgacagtgcccctcggtgactctcggggctgctagggaagatctgtcaccctcttggcagaagaggcctttgttcccgatgttgggaggtgggatgtatgggaaggcttacaactttagccctgggtatgaactcatctaaaggggatgtgaaacctaaaggtttggggagccttagccgctgcagcctcctcgggagcaggcctgggctccctgggatatcagggtattgtaggaacgaggggtgcggtgttcttcttttcaataactctcttcccggtgtaagactgtccttgtttgaaaaagcactgtgcatgtcctttctttaatcacatctctgcttgacctgaatccgggtattattctcctgtgctgatgtgtgcttcctccctccagcacccacagagcaattaacggctgcccgatacgtcttgtgccaccttgtttcccttatagtttctgaatttactcatgtcctctatcagtacactccatccgctcggactgctggggttctccatcctcacccccaagagcaaacaaaacgaaagccagcctgctgcaggccacttagatatcccgccagttggcactgattagtaacagggacagcatcatggtgctgggtccagttttgcaagtcttgaaaacctgacactatcttgtggctgcgaagagatccccccagctgtgtttttttagggttgtatttgcgtcctgtggcttctattcctcagactagggtggagatggggtgccctgtagttacgaggcacccctgcctcaggagtcagtgtggaagagggttgggcattaatcttagccccttgtccttaccttggttacaggggtacagggtgtatctgaagtggagaggccaccctttgcccatctctacgcctcccactgagccctagtgaaaccaactgtgagtgctcttgactgcccaaccgccagtctagatcagatcctctgagggtatgaaagggtaagctggtttgttcactgcttccccagcttccacttccacataactcaccagtatctttgagtgaagaaagatgtgggtgcccacggaatcttagcctaacttggacccctgtgagccaaagatgacctggagttcagcccactggaagcgcacaccagtgctggcaggcacgcgtttgctgcagaccatcctgttaatgtttaaccatcagccgccacattacctgttagtctggaacattttctttcatcctggtttagaaagctgccctgtgatcttcccatagtggttccacagtagcgaaagcagccggtaactgagggagctgagggggagcccttgggtttccatgtttacaaataagtcttagtaactccgtgctggatgtgcattttgcattcagcttctttatcataagggaggaacaaagactggggctcctgctgacatctgcagacacaaagctgagtcggaatttgtggtcttagcttcggttcagcaccaagtgtatttataagtttgcagtcataggttttgttgtccaaatcccaacaaagccctttcccacctccaccccaccccggaagttatatagggttccttgaagggacaaagcctctagaaaaagaaaagtcactgaaagttgtaatgtgaaaccagcaaagagaaaatacatgtttggtttagttgtggtcacagtccatggtgagaaaagggactgagatttaagtgggagggaaaagtttagggaggcagagtttagtgatttcaaggaggattttaaaatgcagatgagcatgatggacatggggtgaagccttcattctgggttccccccccccagtgaagtttaaaaagtgaggctttgaaggaagaccacttaaaaaaaagggggggggggaaggaaatgaccaaggaggtccttgaggggttttctaggcttgtatgcctaggtggcattttcttaaaattcctacacatgttttataatgtaggtctgacatttttcagtctcataaagtcccccaaaagaatgctaaaaatgccacagtgggggcagttctcccttaaaggtccattttgaatattcaaatttcaactgaaattcttcattcactgtcctggacagagaggcagcctggccccctctgcccttgagggatatgcccttggtccttcctccgatgatgccccgtctttgtgtttgtaggcacctacatagggctgtttttaattcgtataaacatgaaagtgtttaagctctcccttaatggtggccgcctttaccagcccagaagtcccacatgtcagcatggactacacctcaggaaaccctctccatcctcagatgctttgggtggagtgcagacacagcagcttcccctgcaaaggcacccctgccaggtcagataattacttaggttggtagtctgtcacagtggttgaggctcatttaatttttaggaagcaatagatctttaattgttgagctgactagggctgtctccacagtcctgtaggaggagctgcgggtttattatctaccaggattccttctgcttcctctaacagttttcttagttgttgaacaacacaaaccgagggactgatggggagagggaagaactgcatatttttaaggtagcattgcttataaaaagtcatcagctcagctacctgcatttgggagtctgggtgttgagggcggggatttatacagcacctggccttataagttgagtattcatgataggtgaagaggtgaagttttttgttcatgagaatcactaatgaaaatcagttgtttagaatgtgaagggcacagcctacactgctaaaacactccccctagtgggagtttggtagaatacaaccaagccccctgtgtccaaagagggagttggcctttcattgtactccgggtgatctctctccattatccgcgcaaaggaagggcccgagagcaggaacaatttgatcttatatttctttgggttttgtttcaaaatttattttactttctttaaagctctatcatgttaaatatgttctgtgcagttaaaataatgcatgttctttgctgaaaaaaaaaaaatagaagtgtagtctaggatatactggggacaaaggggaagtaaccagagattaaaccttcttttaaaaattaccagtcgggcgtggtggcgcatgcctgtaatcctagcccttttagaggccgaggaaggtggatcacctgaggtcaggagttctgagaccagcctggccaacatggtgaaaccctgtctccactaaaaatacaaaaattagctgggcatggtggctcacacctgtaatcccagctacttgggaggctgagacaggagaatcgcctgaacccaggaggcagaggttacggtgagctgagactgcaccactgcactccagcccgggtgacagagcaagactccatctcaaaaaaaaaaaaaaaaattacttacaaaggccagccacagttgcttatgcctataacctcagcactttgggaggccaaggcaggaggaccccttgagcccaggagttcgagaccagcctgggcaacatagggagaccctgactctagggagggaaattacccacaaagccagcaaacaaattgagcgttctgtatttttattgtagagtttataccaatatccattctatagatgctctctgttgaaatgattcaagaaaaacgaacatctagtttttccttggaatgtggcccagacattggtgtgcatatcccaggactcatattctttaagcttttggataattttgcaaaatcatttcttctttaaaatgttatattcacaccataatatttctttctgaaacctcttgagatacccaaacagtggctgccaaaaagtgcagtcagtgtaaaactaatgaaatgaaatgatgtaagtagccgcgttatgcagatggctgtgggtaaagcctaaagccccaagcaggtgtgaacagtaggtactgtctcctcagacctcaggacggggcagaaccagctccttaccccagccctcctgaccgccttgatggcaaatcatcaagcatgtgacattgaggaggtgtgatggatgcaggttgacattgtagttacacctgatcacgtcaagtgagaatccaggttaggtgcgtgaatctgctggctcaaggactgcaatcacatctggcctattgagggaggggcatctcgtacttgtgccataaaacaatgactttcatccacccaattatcagaggaacttgaatccctgcagtaataaatcagacagtggccgggcacggtggctcacgcctgtaatcccagcactttgggaggctgaggtgggtagatcgcctgaggtcaggagttcgagaccagcctggcgaacatgatgaaaccccatctctactaaaaatacaaaaatcagctgggcgtggtggtgggcgcctgtaatcccagctcttgggaggctgaggcaggagaattgcttgaacccgggaggtggaggttgcagtgagtggagatcacaccattgcactccagcctgggcgacaaggcgaaactccgtcttgaaaaaataataaaaactaaatcagacataggatctgcagctaaataataggtcccaccagcttccaatgtactgtcgtaatgcataattttaagaagttattaagtcttctttcaaccttagtaaagagaaggccttttgacactgtttgatgtgaatattgcagccgtgccatcccttaaaaggactgttgaaaactgataggctttccacatacagttttactgggtggaatggacagataggaacaaatcaagaggcaggaagtcagggtaggtgagatgcctggaacccagaaccccttgtcttcacaggcacccacagcccttcacagtccgctcccctcactgtgtgctgttgccaagcctggcatcaagggtgcccttcctttgaaagattccaccacccctgggaggctgacagctaggaagcctacaagcttgcctgcgcccccttgggtctctgcagcctccacctggagatgagcgtcaggcaagagtgtgcataccatacacacacaacgcaggcttggggtcgtttcctgtgaaactcatcaagaccatgctttggaggattaggggtaggggtggtcctgtgtatgttgcatgtttgtatgatctctttgcactggaaaaataacttataactcaagcttcctcaacttccctagcgctgcgagtctctggaatgcacccctctcctatctcgcagcccctgtctgccctgcctgagtcactcacaccttcctgggggcgggggcagtggaagccaggggttcaggggcacagccagccctgggaacacacctgaggtgatgtggaggctgcttttgcctttcttcacgtccccagggtcatcttggtcctcctgggggatgtaacaggtggtgaggatttgggccgaaagaagtcctcactggtttggggttcaggctgctggcgtgggtctagcccattcccggcgacatccctggcatgggcgtacctggtggtgcccctctgagccctccccgctgtgcttgccccacagacagtcagtcggatgcggagactgcagccgccgcgggcgaagtgctagacctcacctcacgggacagagagcagccgtcggagggcgccactgagctccgccaggtcgcaggggatgcgcctgtggagcaggccacggcggaaacggcctcgccggtgcaccgggaagagcacgggcgtggggagagccatgagccggaggaggagcatggcactgaggagagcactggggacgccgacggcgcggaagaggacgcgtcgagcaaccagagcctggacctggacttcgccaccaagctcatggacttcaagctggcggagggcgacggcgaggcaggcgccgggggcgcggcctcgcaggagcagaagctcgcctgcgacacctgtgggaagagcttcaagttcctgggcaccctgagccgccaccggaaggcgcacggccgccaggagcccaaggacgagaagggagatggcgccagcactgcagaggaggggccccagcccgcccctgaacaggaggagaagccccccgagaccccggcagaggtggtggagtcggccccgggtgccggggaggccccggcggaaaagctcgcggaggagacggagggcccctccgacggggagagcgcggccgagaaaaggtcctcagagaagagcgacgatgacaagaaaccaaagacagactcccccaaaagcgtggccagcaaggcagacaagaggaagaaggtctgcagcgtgtgcaacaagcggttctggtcgctgcaggacctgacccggcacatgcgctcccacacaggtaaccagggcaggccaggtccccggcccaacaagaggaggcgagccgggcacctctcctaggagctcccctgaagcggcgctggaggccaccgagagaacgtttgcttacgttgccggtgtgccctttaagcccgtgaactaggagttttaaggagttgtactctcagcccttgaagacggtgcaggcctcctgcagccaggcaggagagggtccttggccgttgtgtttttgagaacgctgtgatccgcctttagctctgctgcctccgcctccccatctgtagagtgggggtaacagctgccctgtttcatagaggtatctaggagagggtgcttgtgctgggcatttgggccacttagtcctgtctagtcctgtggcctggacgacaggcactgccccaggccgctgtggggcaggcaccctgggtgatccattagggtcaggagggccttttcctttcttagccgtgcagttcggctgagatgactgggacaggacccttagccactgcccttcacaccgttctagagttcacccaccacctgcagggtggaggctgcagaccccagagcaggggcgcttactttgacacaaagacctgaatatgctcatggagtccagagatatatccttcttctttccaaaataacctgtccctcctctcagccgcagcttccctccctgtcacagctgcagcccgcagtgaacacatgtgccccgacccagcgcagtcggctctgccctgcgcttgcccgtgtgaagggccagggtccttggctctcagaagagggatattcttgggctcccaacaagcgtggtgggccctgccctgggcctggcgtgtgagccatcaggaaagcccccgctgcaccacatcgcaatgcagagggtaactggtgcccccgacctaggtgctgctgtccatacagatccctgagagggtccactcctgtccccctctagattccttcccagtctctggtcgaggccagtctgcacatctcctgaggcttctgcttctgggacctgggttttctggatcagtatgtagagtgcctgggctgagagaggaaggagaggaaaggtctcagactgacagcttgaaccagcaaacagagcttgtccgtcctcagtttgctggttcaaggaagaggcctctggctgagtaggacggagtcctggccccccgcacatagcctgggagcctcattcttcctgtgcagagcagggtgcagtgggtactggtgccttttggttaatggaaattctttcttccattgttccaggggaaaggccatacaaatgtcagacctgcgagcgaaccttcaccttgaagcacagcctggttcgccaccagcggatccaccagaaagccaggcatgccaaacaccacgggaaggacagcgacaaggaagagcggggtgaggaggacagcgagaatgagtccacccacagcggcaacaacgccgtctcagagaacgaggctgagctggctcccaatgccagcaaccacatggctgtcacccggagccggaaggagggcttggccagtgccaccaaggactgcagccacagggaggagaaggtcacggcagggtggccgtctgagcctggccagggtgaccttaacccagagagcccggcggccctggggcaggacctgctggagccgcgcagcaagaggcctgcccacccaatcctggccacagctgatggcgcctcccagctcgtggggatggagtgacagcctcagtccccctcagcacagacaaaagccagcagagcaaagcgtctatacttcatggggtttcctcagtgccctttggctgttgaggagtgagagagagagagagagagagagagagagagagagagagagacaagcaggagcgtggctgctcgctcagtgccatagccttaccgcagcctgcgcgggaggccacagcccgtgccgattccagtgccttaactacttaccggatccctccatattatcatgggtgttgtatttttccaaaatgacttcttaaacaaaacaaatattataatgaattgtctggagaggacctcttcatttgagcattagcgttattttgtattggtgtgtgtgagcttgttcttgtgaatctgtgatagcaccgtttgttctgtgagctggaaacagaaggaaaaaacatacccttgggtacccatagccaataactggaagaaaatgatgtgaatttcatgtaaatgaccagaggaaagatggataagatgataatttcttaaatagacattttccttttttctttgtgcttcatggtggagctgtcatctggtccttggtattacaggatgtggttgatgaaggtttccaatatggtttcaggccaaaaccagggaagattctagcttcagcctcatgtccatttccagtctgtcagcattagacatggtcactgttcaagtttcaagacatccattcttaactatagagaagagttactcccctggcgtcttaacctatggaaaacatgcacggataggatatatttgattgcctcctcttccctttcagtatatgtattattaatattattattattattattattattagttcatcagtttgctgttctctgcagtgagcagaatcaaatgggcaatatttgtcctgggagacctgtgccgcacccaggtccccgtgttaacgtgtgcctgcggttgtggttggcaccctcgggtggtagctcttctactgtaatgagacaagcctttcttctgtcactgcagaatttagaaggggccgtgagcagtcttcccaagcatggtccaggagcagctcagagagggtggagtgaggatgcatgcatccagggaacaggcatcaagaagccagggccgtgcctggagcactgcagagatgactttggagaaagcaaagcagtgacccagtgaccaggcacattactcgtgagcgaggtattcccagtcttcctgctaagcctaatccaagccttacccagctgtgctactgtcatttgcaaagcaaggaaatactactactggtaataaaactacacatgcaagatgtcagataagaaataggtttatatttaccttcctgcgatgtggggttggtgcttgaagataaatgtgctgtttctagtttcttaaatagcccacacccctggatgcaaaaaggcagggttatttttacccatgagcatcctgtgcaggcaatagacttccctcactgtctccgcctgcagggaggagaatgtaccccactgcacctgagctcctggtccctcagccaagacctcaggggtccccagccagcctgctgctggggacccctgtgcttgctgcagtgtatggagcctcttgccttcccctggggaggcacccctgtaccccagcttccttcccctggccttttctggccccagtgctcctcctttacatagacttgttcacacagaaacgtgcacgcccccttttctccgccacttcaccagtttctgaaatccaacctcccagacttcacaggaagatagatattcttgagataatgaaaagtgatatcttcgcatacgaaaggaaaaaaggttgaggtatatatgatttttaactgtattaggggtgtatgaaccagtttaaaaacgaggttttatttactgtagagatgaatgcaaatcagaaccaatgatcccttggcctacttagttaaaaccagttcatacatcccttagggtttttattattattattattattattacagttgttattgttgtttttgttgttattattatttggggtttcttgtgttttttctttgcgactctccacactaaacttgcaatattgtggggagaagctgtgactaaactctacgctgcggtgagatgtagcagtaatcagctcccagcgacgtgtgtagctggggctgccgctcgcaataatcactattgatttaaagctttacttagccttgatctgtaccctcgtagtcaataaggtcttgccacattttattagtgaggtggagaaacgtattatttgtttgttgtttttgcccttcccccaccccccaatattaaactgtgaaatttgtgatttgtttaaactctgggtgaatcatagcttagtttgcatgtccagctaatttgtttctatacattttgtttgattctctttctccttctctcagggcttttacaaaaaaatatatatatatggatcttctgaaaagttttttgaggtgcaagttttttctcttttttttttttttttttttttctcattgattaatggacatgatgctgagattcaatcactacatgaaacacctggctgtgaaaacaaaacaacccagagggctgtgttccaagcagcgctggggaagctacgtaacagtcggatgccagttttggaagattcaccatgcgttctgaccctctgttcgtctctttcctctcctctttcttcaagaaggaaattgatcctagtgatttcagcccatgcattaaacaggaaacaataataaatttgtagaattcatatttttctaaagggaacttaaaaactgctgctacatgttatgtacaaaactggtttatgccacatgaacagagaatcacaagtttggttttggtactttttgttcctctttgtattcagttgtatagaacttccaaattcagaatgagaagaaagctgttctgtatcaaaccatttaagcaataaatgttatattttaaaagctgcagattgccggtcacgtggccgtcctgtgatttgttgtgatcccatccccaaacccacagcccacttggggcaggtcccaggtgtgcagtaccattggggggagtcacaggtgcccaggaaagctcttgtcacccaggcagcatttttatttgcgctggaggctgtggcagtgactcttgcctatgctcccagcactttgggaagccaaagcaggagattcacttgaaaccagaagttcaagaccagcctgggcaaaatagtgagacccctatctctagaaaaaaatgtttaagaactagcttggcatggtggtacatgcctgttgtcccagctatttgggaggttgaggcaggaggatcgcttgagcccaggagtttgaggttgcaatgagctacgatcgttcctctgccctccagcctgggggacacagcaagaccctgctgtatgtaaaagcactcggctgcagttgtgagagctgctttgagagcatgtggaaagttaagtgcatggccactgtcagagcttcagagtggagatcttggtgttgggtgcacagggccaggaggctggacctaatgaggcaccacagtgcaggccactctgtcattggctaaagccagcatttttgtttcctgtgcaataatgcctaagaagtccgcctcgcctcttcttcctccaacccagtggtaagtgattgagtcagcacctagtggagggagaacaaaatctgttagtgtgaccagattttggtgagacgggaggggacagcaaccctagggctggggatggtgcaggttaaaactcacatttgggtaaaatagcaatcagcagagccccaactcctagcagagcctcaactcctataactagggagtggctctcaaaaagcaacactgggggctgggtgcggtgtctcacgcctgtaatcccagcactttgggaggccgaggtgggtggatcacaaggtcaggagattgagaccatcctggctaacacggtgaaacaccatctctactaaaaatacaaaaattagccaggcatggtggcaggtgcctatagtcccagctactcgggaggctgaggcaggagaatggtgtgaacccgcgaggcagagcttgtattaagccgagatcgcaccactgcactccagcctgggcgacagagtgagactccatctcaaaaaaacaaacactgggccgggagtggcggctcacacctgtaatcccagcactttgggaggccaaggcgggaggatcacttgaggtcaggagttcgagaccagcctggccaacatggtgaaactccatctctactaaaactgcaaaaaaatttgggtgtggtggtgtgtgcctgtaatcccagctactcgggaggctgaggcacgagactcccttggacccaggaggcagaggttgcagtgagccgagatgccgccactgcactccagcctgggccaacacagtgaaactgtctcaaaaaaaaaaaaaaaaaaaaaacgaac

SEQ ID NO: 525 - DNA, 42381 bp, Homo sapiens
  source 1..42381: mol_type = genomic DNA
aaaattagccgggcgtggtggcatgcacctgtaatcccagctactcaggaggctgaggcaggagaatcgcttgaacccaggaggtggaggttgcagggagccgagatcgcaccactctattccagcctgggcgacagagcaagactctgtctcaaaaaaaaaaaagaaagaaagaaattaactctggctcctagaaggagccctatatctcagcaggacactcagtcattcaacagacatctgtcaagcacctgctgtatgctggagctgtgggtacgtcagcaattagaggaagagggcaggggtacaggagttcctgaccaccccaggccagcacgctcctatagcagctggcaaggagcagatgactcagacttcagctcagtccacaggacagccttttctggccactgctctcaggagatgagatgtgtggctgcaaaaggtaaactcctggctcctgagcaggctctgggcaatctgctcaacgctctgtgcctcactttctcacccagaaagtgtggacaatgagaggacttatctggctgggcgcggtggctcacgcctgtaatcccagcactttgggaggccgaggcgggtggatcacctgaggtcaggagttcaagacctgcctggccaacacggtcaaactccatctctactaaaaatataaaaaattagccgggcttagtggtgcacacctgtaatcccagctacttgagaggctgaggcaggagaatcacttgaacccaggaggtggaggttgcagtgagccaagattgtgccactgcactccagcctgggcaaaaagccaaaactctgtctcaaagaaaaaagaatcatggcagaaggtgaagtctatgttagtcccagttcccaggtcgtacatggcggcaggagaaagagagagagaaggggaaactgccacttttaaaccatcgggtctcctgagcactcactgtcagaacagcctggaggaaactgaccgcatgatccaaccacctccctccaggtccctccctccacacgtggggattacaattcgaggtgagacttgggtggagacacagagccgaaccatatcagcatgtatggggggcactgaaacttgtgcttggtgcccattcattcaacgagtgtgtgtggctggtctcctcatcttcaactccctgccgagtctcagataggcagcctgcagttccttcaccacaacaggcacatggggctgggtgccagtgagtgctggggcttctccgagcactatctcacacccaggagcgtgggcacgcatggcattcgcatgtgccgtcagtggacattaaacacagccatgaagaagccacgaagaagtgctgcctgccggccgtgcgcggtcacgcagcgccaactccctcctggggccttctggggccttctggggcatgggagctggggccgcctgagacaaacatccgtgacgctgggctgaccccacagaacggtgcgggcctcgctcttggagtcagccctgctgccagccagtgccgggtgctggggactcagggaggcccgccgggaccactgcgggacagtgagccgagcagaagctggaacgcaggagaggaaggagagggggcggtcagggctctcaggagccgggtcctgggcaaggcgcagccgttttcaaattttcaggaaagcggtcggctcacactcgagcagtaaaaagatgcctctggggaggaggcccgtgcagctctccgggcaatggtggtggctcggcctagagaggcggtagtggaacgcagaccctggtgggggaatgacatcaagggaggagacgggcgggaccccagatttctgcctgtgggcgatggaagtgaggttcactggccagcggagccggacacagaacgcgcaaaacgccgtgtaggcctggaggagccgaagagcaggcggaccccctccgcgggggaacagtttccgccgggagcacaaagcaacggaccggaagtggggggcggaagtgcagtgggctcagcgccgactgcgcgcctctgcccgcgaaaactctgagctggctgacagctggggacgggtggcggccctcgactggagtcggttgagttcctgagggaccccggttctggaaggttcgccgcggagacaagtgagcagtgagtcgcagtgaccctacaagtggttcttttacccgagcggctcgtaggcgcgttgcggtttttcgaaactacagctcccggcaggccccaagccgccctcggggccgcgggtcggcggattggccgcgctgcattttgggacctgtagtttcctgcgctcgtggcgctggcgccgcggcgttggctgagcccttgaccggggctggagggaagggccgacattcagtgtgtccgcgtctgttctgttagtcccagttcccgggcgggattgaggcttagagaagttgagtgatttgctgagggctgcacgggttggcatcccggcatgctctttcgctactttggctgcatctggttgcccacccgggcggatggggaatggactccagccagccaggagggcagagggctggagaggcagggccggaggttcagaccctccgctctgacgttgcgcctggtgaggccgggaggggtgccgcttgcctcttcagccctcacgctcttgtggaagtcgcggaattactgcaggcggaacttgcagcactgtgggcgtcttttccagagaaggacggagttgtggggcgggaggataaggcaaggcccagccacttcgcatcttcgccccgccagctcctcgagatgggatataccagggttgctctccaaccctctccgcaggagggactgatggaaacgcctgggaaagtagcccggtacccacaaaggctgtctacaaacagagtcttactgtctttcccaggtctgtgccatagggattctcgaagagaacagcgttgtgtcccagtgcacatgctcgcatcgcttaccaggagtgcccgagaccctaagatgttcggagtggttttttcgcacagacccgaatagcctgcccctcagccacgctctgtgcccttctgagaacaggctgatatgcccaagatagtcctgaatggtgtgaccgtagacttccctttccagccctacaaatgccaacaggagtacatgaccaaggtcctggaatgtctgcagcaggtagagcacaggccccgaggaaaggactgcgggtgggtggagcttcagccaggacggggtgtgcttccctctcccggcccattccagccaggcccctccgggccagaggcagcgtctgtcataaaaagggctggtgttccaggtggggtcagagagaggattgacaagtaaaaacgatcgtcctttgaagggggccggcccctccacacctgtgggtatttctcatcaggcgggacgagagactgagaaaatgaataagacacagagacaaagtatagagagaaaagtgggcccaggggaccggcgctcagcatacagaggacctgcaccggcaccagtctctgagtttcctcagtattcattaattactattttcactatctcagcaagaggaatgcggcaggacagcaaggtgatagtggggagaaggtcagcaagaaaacgtgagcaaaggaatctgggtcacaaataagttcaagggaaggtactatgcctggatgtgcacgtaggctagttttatgcttttctccacccaaacatctcggtggagtaaagagtaacagagcagcattgctgccaatatgtctcgcctcctgccacagggcggcttttctcctatctcagaattgaacaaatgtacaatcgggttttataccgaaacattcagttcccaggggcaggcaggagacagtggccttcctctatctcgactgcaagaggctttcctcttttactaatcctcagcacagacccttcacgggtgttgggctgggggactgtcaggtctttcccatcccacgaggccatatttcagactatcacatggagagaaaccttgggcaatacccggctttccagggcagaggtccctgcggctttccgcagtgcatcgtgcccctggtttatcgagactggagaatggcgatgacttttaccaagcatactgcctgtaaacatattgttaacaaggcacgttctgcacagctctagatcccttaaaccttgattccatacaacacatgtttctgtgagctcaaggctggggcaaagttacagattaacagcatcttagggcaaagcaattgttcagggtacaggtcaaaatggagtgtgttatgtcttccctttctacatagacacagtaacagtctgatctctcttttccctacagtccttgagggtgacagacttaggagtgccttgggggcctctctgaggagcagctgatattcacgggtcaggaggaagcatttccattagaggggcagccggtggccagcctcacttggaaggtctttgaacctcgggggtgcagggaggtggcagtggtgcaggttgccttctcctgggttccttgaggtgccctcttgtacccggctcacacccttcccctccccgagtttcctgctcaggttcccgtctgagagcttgtatgtaggacgtcagataggacagcataaatgtttggatccagaaacgcagaacagtttcctattttgagacttgacacctaattagtcatcttactatttaagctgaaaaatagtgtcgtgttttgggtaacgttctgcaaatcgtttgctaatggcggctgagttgcttcacgccctttagggcaagagtgggacttgcctgtggacttctccgcggtcccacagggctctcgccacctggcagtggcctctgcatctgcaaagagctgcccgctggctgccgaagcttgtctcagggcagcttgtgtggcctcgcctcttcctggcttccccgtaacccttgctccgaactccgttcagaaggtgaatggcatcctggagagccctacgggtacagggaagacgctgtgcctgctgtgcaccacgctggcctggcgagaacacctccgagacggcatctctgcccgcaagattgccgagagggcgcaaggagagcttttcccggatcgggccttgtcatcctggggcaacgctgctgctgctgctggagaccccataggtgaccctagttcccaggcctctcctggcctcctgtggggatggttggcaagggatggcgctgagggtggggtgggcccatggggactcctgccgtctctcaagcagaactcaaggagaattttttagctgctgtataatttctcgccatcgtgggtgtaaacctagggttgggcttttttgctgaattagggcacggcagatgcccacttcacccatttttgataaaccagtatctggggtgtcagattcttggctgtctgcagggccgagttagccgaatgccacctgcctttgatacgtgagaacgttgtctgagaaccgtgacttctgtgcttgcttgtgtctggtcagcttgctacacggacatcccaaagattatttacgcctccaggacccactcgcaactcacacaggtcatcaacgagcttcggaacacctcctaccggtgggtcagacgagtttacacctgtctcggggtcctcaagagaaccagcttggcatggtgctgagtccacagccccatgctgtgctgtggtggagggtggtggtctttctagacgctcccccgaagtgtgcagagcgctggtgcccaggggtggggtgcggcctgggctgcctccaatgcccattacttgtgaggaagcagctttgcatctgtgtgctgaccttgggcgggcgtcctgagctcctcgcaggtgctgttgtagcagctgtgcagtaggtcagggctggcccccagtgcagctttgcacatgaagtaggaggaggccctgctgcttgtcagagcccagcagagtcttggtgttctgtcgggttcctgtggccggaccagtggcagggtgctgtggaagctgtcgaatctcctccctctgtccagtacccccgctcgtcttctagctccctcctacgcccgggccacgtttcagttatgctcacttcctctgaccgccgaggctcctgcgtgtctccatacagctcacgctgcagggccacgctgtgggtgttggagacagctcctcctcgacccacggtgctctctcccaccaggcctaaggtgtgtgtgctgggctcccgggagcagctgtgcatccatcctgaggtgaagaaacaagagagtaaccatctacaggtaggctcctgggctcccgctccggctcagtgtccgacaggcgagtgctgctgggtgtccagagccccaggctgcgctcccgctgggctagggtttgaagttcactgggggactgcaggggaggacctggtgggggtggggactggcttcggtcctttcttggccgtgcttcagctgcgcactctgcccttcctcccacagatccacttgtgccgtaagaaggtggcaagtcgctcctgtcatttctacaacaacgtagaaggtacaagcagctgggtgggaccagggtcgggttggagtgtgtgcagcctctcagggtggagctcagtggtgtcacagcctggttgtgcttgcccggtggggcggccagtgcggccatgtacctgggccctgtcttctgactcggggccacccatgttagacttctgtgtggaagagctcacacagtggtctgagacagccagccggcaagactgcctctggctggtgcctggggccttggattttgggaaggctccctccatttcctgatgagagggtctccctgcacctaacctgctggtgcaaacagtaggggttttgctgaacaccggctttctcttcggggactttgttgcttgcccagcagcaggtgctccagtgaccggccctcataccatcttgggagggtgtcctggaagccgtgtctggcctcccgcgaccctgccccgtgtgtctttttcctgtgctgaccttgctgcggaaaattatggccctgagtgtgactccaggctgagtcctgtgggtccaacacgggatgccttggggcctcttctggagacgggatgtgagtgacaggagccggccggggcagcttgccctgtgactgcacgtggccacagcctgtgagggccgggggtgcttctccacccacgtggctgcccctcgggtatgtcaagggcttctggggctcatcacggggtcctagagacagtggcagggtgcacccccgttggctgcccttacagtttctgtgacctgagggtggcatctgtgcagtcggcgcggtctgtgcttctgtgggatcagggttccctctgtttcctgcctcagttggggctcaagcctcaggtgaggtggccccggagcactcagaaggcatcggcggtcctgtgggctgctttctgcactcacgtttgctgagtgctcagtgtgccaggactgaggaccctgaagctgctcttgtatttagggcggcgctcccctggcagagactgagccaggtggtcccgcatgacccactaccaggcgtttctgggccctggcccttggagggacagggtgggcggaacatgggcctgcagggaggctcccgcttactggaggcatgtgctgtgttgctggagacatcctctgtgttgcttcttgttcgctgtggtttttggtctggtggcaccaaggaccctcagtcatcttgatgtgtggttgtccaggcctttttgttggtcctaagaaggggctctgcctttgtgcccccaggttccctgacaggagctgccggctcgtcccggtgatgcctgcaggacgtgactctgggacggggggttgggcagatgtgctgatggaaattctcaagcaggcgtcatttccgaggtcctcacctggatttccaggacaggagtgcctgctgggtgtccccagtcccatgcagcgggggtccttgggatagcatggaacgctgagcatgggcctggccggccgtggtcctggacaagggcagtgccccggtggctgctgggcctgggacctggtggggacgctgggcctggtacctggtggggatgctgggcctgggacctggtggggaggcctctgactgcctcctggtgctgcttccgtctgtgttaggcctctgggtattggggcccccatctgtctcctcctccaggcctgtggactcagaccaggaagacacaggccagcccctgcctgtcccccttggcttgggctctcactgcccgacctggcgggaggttgcctagccgtgaaccttcgcaccctgtctgccaccggacaggctgtgagggggtgtctgcagcacctgcaccggcctgagcatcttcagagtgggctgcagctcctggaggggtctgagaggaagggaggcaggtattttgggcgaatgaggagacagctggagagctggcacccttcctggcctgcgtcctgtgaggactctggttggggacagcaagcttggggtcagcctggggcagagcctctgggacggccccgcccctcgtgccccttcccctcgcagctcctgtcctcgccccgccctcagctctccgccaggcaaggtttggcaagtgccgctgtgcggcagtgcctgctgattggctggtctgttgctatggtgctgcccaggggtgtgcttttcctcccctgccttccctgctatccctgggagtatctggggttgggtcatcgctggtgtgtgtgagtgtgtgtgtgtgtgtatgtgcacgtgtgcatatgtgtgcgcttctggcctctgcagctgagtcctggccctcggggggcctggcacctcctggggacaggcacaaagcagccatgatggagtcgggagctgggggaggccccattgccccacgtggctgccctgtgactctggggtgcttgttagaagaggtatctggttctgtctgtgtttaagcaactccctaaggaattcttgtggttccagtttggggggcctgtactgtagaggcaagggaggggcaggacatcccccagactctgacttctgaagccttttctgcccggggcctctccgccagtacaggcagtgtcctttgccagggctgccatgctgcagaggggagtgggccactgtttagcccaggaaaacctggctctcccttagctggaagttctgggcctgttgtggttggcagggaagctgagtgacggtgctaatcacaggggcacctgcaggggtttgtgggagatgcctctgtgggttggggcgataggctgaggggctgttcttccctgccctgaggagggctgagtgtagccgccactcctgtcctgtcttgggctgtctcggagaggatgcgtagaaccctcgggatcctgctggcctccgtctggtccaccctgaacctcaggccttctgggggcagaggaggattccctcaggatcactcgggtgggggcctctcttgggcacctgagaccctcagtgggtgctttgtggcgcgttcacggttggtgggggacgcccagccctgcccgccgtgtaggagccgttctgtcctgggcatccccctgtggtctgggacttagtggaccctgagggtgtgtgtttacccctgcctcacacctgcagaaaaaagcctggagcaggagctggccagccccatcctggacattgaggacttggtcaagagcggaagcaagcacaggtgagacccctcagtgaggccacgaccactgtccttccatggcccagctctcctgtgacctgtggaggcccggatatatttcttcacttttctttgttcctttttaaattatgaaactaaccaccattcagtacgaaaaagtttaagcagctctgaggaagatagagtaaaaaattgtctccctcttccctggccctcagccatccccggtggccaccgtggagtgtggacggagccctgcaggcctgtgtctgtgcggaagcacgcgcagttttgtctgcacagactgtcctgcagttggctgttttcactcagcgttgtgggtatagcttcccatgctggtgctggcagctcggccttgttcttttgaggacagcagatgtctcctatgtctacctcttacagcttcagagattcaagttataataaagctcttcttatattgagggggaaacctccctcccccttttttttgaaacagggtctcgctctgctacccaggctgcagtgcagtgtcacagtcttggctcactgcagcctcagcctcccaggctcaagcgattttcccacctcagcctcccaagtagccgggactgcaggcacacaccaccatgcctggttaatttttgtattttttgtacagacagggtctcactctgttgctcaggccagtctcctgagctcgagagttccacctgccttggcctcccaaagtgctgggattacaggcgtgagaccccatgcctggccagctctttttttttttttttttttttttgagacggagtctcgctctgtcgcccaggctggagtgcagtggtgcgatctcggctcactgcaagctccgcctcccgagttcacgccattctcctgcctcagcctcccgagtagctgggactacaggtgcccgccaccacgtctggctaattttctgtatttttagtagagacggggtttcaccgtgttagccaggatggtctcgatcttctgaccttgtgatccgcccacctcggcctcccaaagtgctgggattacaggagtgagccaccgcgcccggcccagctctgctttttcttagtggttctgcgttgtgtttgtttctatccaggaatagggttggttttacttttccatcgagtttttaaagagacgacgatttacatggtcggaaactcacgaggactccccatcccttggtcggaaactcacatggactccccatcccttggtcagaaactcacgtggactcccatccatcccaggcagcagcttcccacctgggccctacgtgcaggatgagggctccttccgggtcagaagacatggcggcctcggggcaccgtcccctgcatggggtgctcacaggatcttctcctctctccttcccagggtgtgcccttactacctgtcccggaacctgaagcagcaagccgacatcatattcatgccgtacaattacttgttggatgccaaggtgggggctcagtcctgtagctgacgactcctgatgtccaggggtgtccctgggcttgggaacagctgtccgagcctttgctgcttcagggccttagatcagcaggcctgggtgggaggactcacctctgtcactgggcaggggctcaacctggccagacacacttgtgagcagccccaggccacaggtcagttttctgagcagtctgggagcgggcaggctggtgggagtgaggagagacctccaggctgtggtccataggccagtgcccgctcttgatcctgacagctcaggttctctccttcacgtcaggccatgggaggcaccgagaacacaggaagcccactgactcccctcttcccagcgcgtgcccggccccacactcactccccctcccagcatgtgcccggcttcacactcactcccctcttcccagtgcatgcccggccccacactcactccccccacagcatgtgcccggcctgacactcactcccctcctcccagtgtgtgcccagccccactcccttccgccccgtgtgcccagccccacgctcactccccccgccagcatgtgcccggccccacactcaactcccctcctcccagtgtgtgcccggccctgctgccctcctccccatgtgccctgcttttgtgccccacactttttacttagtgcaggtgggatcacacgccacgggtcaatggtttgtgtgttcacgtgacgatggcgtggtgacgtttccagatcccgtcgttggttcgctcattctcggggtgtatatttattgagagctcatcatgctgggtgctattccaggcatagcaagactggcttcactcacatggagctttgattctagtggtggggacaggtggacagcaaaagagtaagcacgtgagctgatgatactgaagggaaatagagcagagggaggaggcggagaccgagccaagcgggcccaagtgcgatgtcggcgggaggtggggaatgctggtgggtctgaggggagcctcagcaggtgcagcagagcaagggaagaggtgagtgggggcggctggggggccgactcctgggaagctgtagcagaaccccacagagagctggtgaggtttgccgtggttgtgggtgactcggtgctttgagccctggctgcccctgggaaccatctggagagcttctaacccaaccaggcccctccctgggacagttatatcacagctggtaagccgagtctaacactttcacggaaacgcagaagatctaaaacagcaagatgaccgtgaagaagaacagagctggaggactcacctcgctggtttcaagactcctctaaagctgcaggagtggaggtggagatggcccagctcaggcacaggcctgcaggccatggagaaggcagcaagctcaagctgacccacacgcatgtggtcattgttttttttttcagttggaatctcactctgtcacccaggttggagtgcagtggcaccatctcggctcactgcagcccccgcccctaggttctagcgattctcccacatcagcctcccgagtagctgggattacaggcgtgcgccaccatgcctggcccttggtgattgttttttgacaaacatgccaatttaattgagagaggaaatgaaggttgatttctggttttctgaaaaaatggtgctaagaacagctggatatctgttcggaaaacagtgaatcttaactcttgttttaccctgtataaacctaaatgtaaaagctaaactaaaagttatagaaaggaacatgggggaggtctttgcaactttggggtaggcagagatttcttagtatggatacacaaggcactagccatgaagaaaaacattaaaatttagacttcaccaaaatttaaagcttcaactctgtggaagagttgagaaaatgaaaaagcagttaaagaaagggagaaaatacttctttcaaaggacttaaaaaattttttcagccctcctctgatttgaaaggacctttgaccagagtatgtaaaattctcccataactaagcaaacaacccacttaaccactgggaagggatctggacagacgtttcaccaagatgggtggaatggccagttaaccactgggagagcatccggacagacgtttcgccaagatgggtggaatggccagttaaccactgggagagcatccggacagacgtttcgccaagatgggtggaatggccagttaaccactgggagagcatccggacagacgtttcgccaagatgggtggaatggccagttaaccactgggagagcatccggacagacgtttcgccaagatgggtggaatggccagttaaccactgggagagcatccggacagacgtttcgccaagatgggtggaatggccagttaaccactgggagagcatccggacagacgtttcgccaagatgggtggaatggccagttaaccactgggagagcatccggacagacgtttcgccaagatgggtggaatggccagttaaccactgggagagcatccggacagacgtttcgccaagatgggtggaatggccagttaaccactgggagagcatccggacagacgtttcgccaagatgggtggaatggccagttaaccactgggagagcatccggacagacgtttcgccaagatgggtggaatggccagttaaccactgggagagcatccggacagacgtttcgccaagatgggtggaatggccagttaaccactgggagagcatccggacagacgtttcgccaagatgggtggaatggccagttaaccactgggagagcatccggacagacgtttcgccaagatgggtggaatggccagttaaccactgggagagcatccggacagacgtttcaccaaggtggatggaatgaccagttgagcacatggaaagtcgcccagcatctccagtcataggagaaggcagattaaagccacggggagccgacactgtggtcccactggcatggctgaaattcagaagccctgagtgtggcatgaggatgtggaacagctggatctcatccatcgctgtgaagttgtgtagccactccacaaacgtgtggcaaacagccgagccgggagaagggaagacgtgttcaaagattcatatgtggccaggctcagtggctcacgcctgtaatcccagaactttaggggccaaggctgggggatcgcttaagcccaggagtttgagaccagcctaggcaacatagggagaccccatctcaaaaaaaaaaaaaaagaaaaaagaaaagacttcagtgtgcaggtttaccagagttttgtttgcagttgccaaaactgggaagcagcccgcgtgagcccatccacaggtgaatggacagaccgtggtacccgaacactaacagcagccacgggcgtggactgtggtcacacagcagcagggagccgatgagtctcggacatgctaacccagagaggcccattgaggaggacctactgttttttgtgtttttgttttttgttttgaaatggagtctcgctctgtggtgcaggctggagtgcagtggtgtggtcttggctcactgcagcttccgcctcttgggttcaaacagttctcctgcctcagccttccgagtagctgggactacaggcacccgccaccacacccggctaatttttgtattttcagtagagacggcagttcgccatgttggccaggctggtcccaaactcctgaccttgtcatccactcactttggcctcccaaagtgctgaggttgcaggcatgaaccaccgcacccggctggacctactgttttattccatttatgtgacactctattaatagaaaaggcaggggtggggctggtggttatatggtgcacataactgccagaactcagtacacttaaaatgaacatcttaatgtgtgaaatttttttttttgagacggggtcttgctctgtcacccaggctagagtgcagtggtgcgatctccactcactgcaagctctgcctcctgggttcacgccattctcctgcctcagcctcccgagtagctgggactacaggcgcccgccaccacgcctggctaattttttttttttttttgtatttttagtagagacggggtttcacagtgttcgccaggctggtctcgatctcctgacctcgtgatccgcctgcctcggcctccgaaagtgctgggcttgcaggcgtgagccaccatgcccggccaatgtgtgaaaatttaaaagtaccaaagctggaccccaccccagattgctcccatgacactctgtgggtgggacctgggagttgggttttgttttgttttgttttgtttttgagatgaagtctcactctgtcgcctaggctggagtgcagtgacacaatctcggctcacattaacctctgcctcccagatgaaagcgattctcctgcctcagccttctgagtagctgggattacaggcacacaccaccaccccctgctaatttttgtatttttagtagagacggggttttaccatgttggccaggctggtcttgaactcctgacctcgtgatccgcccgcctcggcctcccaaagtgctgggattacaggcgtgagccaccgcgcctggctgggagttgggtttgtaaatctccctgagtggggctggggcagggaactgctgggtctgggtcttcctggctcctctggtctgtggcttcctgactgcggtggccgggggctcccagggcatcgtggccgtctgtcttgctgagcgtggcacgtgcctttccatgctgtggaggagcgtctcccggtatggcgaactgctggttagggtggggcggtgttgccaggtcatccaggtctggcctctgctctcgacatcgccggcgctgttgctcatctgcgcttgtgatgttcgatgcctgctgcacatgtcttggcttccctctttcccggcctctgtgagctccagcgctgcgtcccttctcttcctcctgtagagccgcagagcacacaacattgacctgaaggggacagtcgtgatctttgacgaagctcacaacgtggtgagtctccgctggcctcctaaacacctcctattgcttctggcctttttgtcaagagccacgcaaacctttctggaggggctctggccaaactcctgaagccctaggtgcccaggactggggactgagcacaccaggagcttctgccaccccctcccgccctgatccgatgcctctgctggggctggagactggccagctgggccagggacctgcccgtcaggcgcagggcccccacaggccgctcaccagaccctttccctccagccagctcggggtcagcctgggccagggctgtctcctctgccctcggcagcagcaggcttgtggtcttgcctgcagtgtctctgcccttccggccacatggcttgagactgaggcaggagaatcgcttgaaccttggaggcagaggctgcagtgagccaggatcacaccactgcattccagcctgggtgacaaagcgggattctgtgtcaaaaaaaaaaatgttgactgggcgcgctagctcatgcctataatcccagcactttgggaggctgaggtgggcggatcacgaggtcaagagatcaagaccatcctggccaacatagtgaaacaccgtctctactaaaaatacaaaaaaattagctgggcgtggtggcgtgtgcctatagtcccagctactcaggaggctgaggcaggagaatcactcgaacccaggaggtagaggttgcaatgagccaagatcacaccactgtactccagcctggtgacagagcaagactccgtctcaaaaaaaataaaatcaaaaagaataattggcaattccagtgaaataattgtttgtttgtttgttgagacagggtctccttctgtcgtccaggctggagttcagtggtatgatcttggcccactgcaacctccacctcctgggctcaagccatcctcccacctcagcctcccgagtagccgggactacaggtgcacaccaccacgcccggctaatttttgtattttttgtagaggcggggtttcccagcgttgcccaggctggtcttgaacccctgagctcaagtgatctgcccaccttggcctcccaaagtgctgggattacaggtgtgagccaccgcgcccggcctgaaacaatcgtttctaaatattggtgtgggccacacagtcatgtttggacctacttgtggccttttacagaccccaggccaaggctttgggaacttggctgtcagcctcctgtgccttctgcacccccaccccatttctgctttctggaacccccgatcctgtcctgttctgtggtgattcgggtgtgcttgggctctaggagaagatgtgtgaagaatcggcatcctttgacctgactccccatgacctggcttcaggactggacgtcatagaccaggtgctggaggagcagaccaaggcagcgcagcagggtgagccccacccggagttcagcgcggactcccccagcccaggtgcgttcatagccagactgcttggtcctgaggcctgcgctgctgcagggtgagccccacccggagttcagcacggactcccccagcccaggtgcgttcatagccaggctgcttggtcctgaggcccgtgctactgcagtgggcagcctgccctgtggctgtgtgtggtcggcctgggcaccatctattcaggctggcactgcagggcatccgcttctctcagaggcttcttgggtgtgaattcttcagggtcctgtagcctgtggaagggctggtattgttcagtagttctggtattttccaaagacctatgtcttctcccagccagtatcaacttggcctctactgtgtaaaactggaaaactctactttgtgaagctgagttgggagcatcgcttgaggccaggagtttgagaccagcctgggcaacatggcggaacctcgcccctgccaaaaaattagccaggtgtggtggtgtgctcctgtggtccaagcttttccggaggccgaagtgggaggcgtgcttgagcctgggaggcagagcttccggtgccccagatgactccactgcactccagcctgggcggcagagtgaggccatctcaaaaaaaaaaaaaaggaaaactaaatatattcactgtaagggcattttgcatctttaaatgacccacaaatctggcatgcatcagctgctctgcctgtaggttccttcccagtgtttgtccagaggtgtatttccacacagcgctagtcacggcatacgtggaaaacgtggaaacccttcatggatgttgtcagttggtctatattttctttcttttttttttttttgagatggagtttcacttttgttgcccaggctggagtgcaatggcgcgatcttggctcactgcaacctccgcctcctgggttcaagcaattctcctgcctcagcctcccaagtagctgggatcacaggcgtgcaccaccacgcccagctaattttgtatttttagtagagatggtttctccgtgttggccaggctggtctcgaactcctgacctcacgtgatccacccgcttcggcctcccaaagtgctgggattacaggcgtgagccgccacgcccggcctttgtccatattttctacatggcttctgtaaacagctgactaggagtctgtgtgaatatcttcataggttctgctgtgacactacttgctcgtgagcatctccaggtgtaaacagcatcagcttcccccattttcctttaaaatcgcacatgtggacggacaccacggggaccctggaccctggggagccccgtcctcacccttctcaccaggatggctgcttggtagagagtgagtttgcaaagttggcatttgtttagtacagaagttatcaggtgttctggctttagaatccctttatatatatatatatatacatatatttaagtgacagggtctcactctgttgcccaggctggaatgtggtggtacaatcaaagttccctgtagcctcggcctcctgggctcatgggatcttcccgtctcagcgtcttaaagcgccgggaccacaggtgtgcaccactgccaccggctctcaagattgccacgcagggagttgcagtgggggaaggggttcctgggactttgaacgctccacctccctcctctccacagtcccccaaccccacctctctaacggggtggacggccgcctctttccatccttcgcttggcgcagggtggggagagtgacaggtctccttccctcatctcggcagctgccatttcatcgcttacataacgtgggagaaacatccacccacccccaggcctgtgtgaacatcaccacggggccttctccactcttcagttttgttagttacttgatgtgcagggctttttgttgtaactagtgggggacgtgtggtggggtgggcttctgccatctcattcaggaccagaacttcagttttcatccctatctgttcccccacccctttggagatggggtctcactctgtcacccaggctggagagcggtggtgccatcacggctcactgcagcctccacctcctgcagcctccacctcttgggctcaagtgatcctcctgcctcggcctcccaagctcctgggactacaggcgtgtgccactgtgcttggcagggtccattcttttcctcacactttatttattgaagagcccaggccgtttaccctgcagagtcggaatctgtacaggaggggcagccacacgagttccccggtttactctgaacttaggtggcttgagggccccagttagactgcggccaccgtttgccgggctccagatgggacgtcctttctatcagaaggctcacagtatctcctttcccgtttcttcccatgtgaacattgttgctgctgaacacctgaatatgttaatcactgggggcttgcaagatggcagtgtgctaattccatcatctagtcagttagcaggaataacttaggaccacgccctgcaccatatcagctatgtggtgatcccattcacacaggaaaggtgggacaaatgctgggggtgggccgggtgtgctgtctcacacctgtcatcccagcactttgggaggcccaggcaggcggatcacgaggtcagagattgagaccatcctggccaacacggtgaaaccccgtctctactaaaaatacaaaaaaattagccaggtgtggtggtgcatgcttgtaatcccagctacttgggaggctgaggcaggagaatcacttgaacccaggaggcggaggttgcagtgagccgagatcgcaccattgcactccagcctggcgacagagcgagactccgtctcaaaaatcaatcagtcaatcaagtgtcatcactgaatgtttgtgtgtgaacgtggggattggtcctgccccatgctccctcctgaatctcactcctgacctcagttgctgcaccttgaggtgttttcatgtgggctcttgtgtcctgaccccggcggttgtggcctctttgctgtctgggagtcaggatttttcacactcatgtcctgctccagacctggaatcagccaagtctccaagaagccctgctttcttttcctgcaagacggtatttcaagacccgccatgcggcagcgggttggtcatggttactgggttggtcgttgttactgggtgttttcgtggagatacagccatacgcacaggtgtgttcacaaatgttaattctaaaggtcaaacacccggccaggcataagggctcagcggtaatcccagcactttgggagaccaagactggtggatcacctgaggtcaggagtttaagaccagcctgagcaacagggtgaaaccccatctctactaaaaatgcgaaaattagccgggcatggtggcgcacacctatagtcccagctagtcgggagacagacacgagaattgcttgaacctgggacatggaggttgcagtgagcagagatggcgctgctgcacccctgcctgggtgacagagtgacaccctgtctcaaaaatgaatagataaataaagataaaacacctgctcctcttggtgtctccagtttggatttggcctgtgtagcctcttccttcgcctgttggtggatttggcctgcacggattctgtgtggcctcttccttcccctgttggtggatttggcctgcacggattctgtgtggcctcttccttcccctgttggtggatttggcctgcacggattctgtgtggcctcttccttcccctgttggtggatttggcctgcacggattctgtgtggcctcttccttcccctgttggtggatttggcctgcacggattctgtgtggcctcttccttcccctgttggtggatttggcctgcacggattctgtgtggcctcttccttcccatgttggtggatttggcctgcatggattctgtgtggcctcttcctttccatgttggtgtccttttttccatgccaggaatcctggttctcaagggcggggttgttggcacgagcgtgatgcagactgcctttgctgcctttctcttgcccagggctgaacatggagctggaagacattgcaaagctgaagagtaagtgttgccctccccgcctccttgcagctgggtggggcctcctccttgcgaggaggtgggtgacacctcctcgacccacagtgatcctgctgcgcctggagggggccatcgatgctgttgagctgcctggagacgacagcggtgtcaccaagccagggaggtgagaggcggggagccagccccttcactgcaggcccagcctagagctagaaacgggccatggtgcagtcctgggctgtcacatcacgagtgaggcctgttttcaggcctgttttccctttttgagacctgggaggagcacctgctttgcatgatctggttgctgagatgttgagaggagcagcacacactcccacgggacagcacacagccccccacggaacggcacacacacccatggaacagcacacacactcccacgaacagcacacacactcccacgaacagcacacacactcccacggaacagcacacacacccacggaacggcacacacacccacggaacagcacacacactcccacggaacagcacacacacccacggaacggcacacactcccacggaacggcacactctcccacggaacagcacactctcccacggaacagcacacacactcccacggaacagcacacacacccacggaacggcacacactcccacggaacagcagactctcccacggaacagcacacacactcccacagacagcacacacacacccacggaacagcacactctcccacgcggggccgctgggtttcctgcagtttctcctcctccaggcctttccctggaccctggtccagtccgtcatttgagcacaggtgcctgttagaacgagaccttcttgttaggacgatgagtgtcccagccaccacctcttttggactccgggaggcctggaacgttctgaacgctccgtggggctccagtcttctccgcagccagggcagcagggtttgctgtctgtcctgcaggcagatgaggagtcagggctggggcctgtgtgggggctctcctgagcgcacagccgccgaggtggagcgtgttctgcctgagcgccgacctggtcgggggaatcccagttgcttccaggtggagccactgtcctcagcgtaatgctcaaggctctggcctggctcctcggccaccctgcaccctcagggtcccctcctgtagcttctgctgccccatcactgtcactctccaaagctttggggactctgcccagagccaccgcctcccagaagcccctgacaacctcttgacgaccccctagtgaccccatccctcccctctgacggcggcccctgctctgaggcggcttcttttcctcggtgctgttctcgtgctggccaggcctcctctccccacctggaggctcctgagggcggaggcctctcacctccaatgctggcgtcccctggagggctgaatttgtttccgagggaaggaaacttccacagttgttgccttcagttccaaagctgcagcctgatttccccctccaggctcgagcctgttttcttctcggcagctacatctttgaccagtgtcgtcccccctcaggcccgagcctgccttcttctcctcagttcccaaagctgcagtctggtccccccgccaggctcgagcctgccttcttctcctcggcagctacatctttgagctgtttgctgaagcccagatcacgtttcagaccaagggctgcatcctggactcgctggaccagatcatccagcacctggcaggacgtgagtgctggcacggggtctttggtgcgggcaaatgtggcgtagggggtgcagcaggcctccatcttggcagtcagggctcccctggccgtcacctggccgtcagcaggaacaggcccacagaacctcatcttctgatcggggcgtggaggcgttagtgccacttgccagctgccgtagagcctgtcccagttctgcagctggcggcttcgtcctacagcctcatcccattattctgcttttgagaaagagcagcccaaggccctagctggcttgtggggcctctggcttctccacaccaccccgagttctgcttctcagagttgtggggtccagaggctttgcccagaggcggtgtccccatgggctgctctggtttgagacgccgggcccagcggggtctctcctctgctgcgctcccgggtgctggggagggtggcttttgctgcttcaacccttaggcgaccatagagcctcttttcaagtcccactgacccccttggagactctgtccctgcctggcttctctcctggctgctgggaagagcaggcgaactgcccgccctgaatggatgctgcgctccaccctgggccccccattgggcaggagatggagcttggcagtcgggctgagcgggctcatgctggaagggccggggctggggtcggggcctcccctgcctgcagtgtgggtgtcagcgccctgctgccctccaggtgctggagtgttcaccaacacggccggactgcagaagctggcggacattatccaggtggggcctgctcctctgtggcatctccttccctgatggaagccgggcgggtgccttctcctgctgtattagttaactgattctagacttggggatgggagaaaggcccctacaccacctgtttctgattggcaaactctcggctcctttccagtgccctaaacccacactgggcctcctgcagggatgggggaggacgaggtctggtggcacatgcccagggtgatgctggtgagggaggacgcaaaggacagtgggggccggggagccgctcctgccctgtccgggccctcaggccaggggggacccactgctggcagccccagcagccccagctgcacgcagatgaagagctctggacacacgcggcttcctgaacagcttctccagggacagacaaatggggaccctgcaggttcccggcaggggtgtccctgggagcccatgattgggggtgcgaccctggcccccttctcattggccccgtcctgtcctgcaatgcccgtcccatgtgaggtctgcttctggctccatgcctatggcagcacctgctttccctggcgtagaggtgcttgtccggtttgtggagggcacgccccattttgggtgctctgggcacgttgcctctccggggcctcggtggcttttttagaagcagactcagaagtccctgactggggaagccaaggcacaggtggctgtgtggagccctgtgaggcctcctctgtgctgcccacgctgtacctgctggccacacgagatcatggcagggttaggcagggctgcccagcgctatgacagcttcatgagtgtccatctggcctgtggggtgcttgagctgggggaggccgcagaagaaccctgggatgcatggctggcctgtgcatgctgctgggcatggagctgcagatcccggaacaagcaggcactgccttctccttcacagacgcagctctgagcgggggcgagacctgggcagggaccaggtggggtgggcacagggtggtggggcccaggctcagccctccctccactgtggccgtctctgtggccagtgacgccacagcctgtgtcttctctgtgcggtagctggggctggaaggacagcactgccttgtcctcccaactcctccccaaaggcacggtgggcatcccaggcccagacccctctgtctgtggctcctgcctgccaagggctgctgtgctgtcccgcatggagtgtggttggctcttcaagcaggaggccgtgcacctatcaggcggacctgcttccatgtccctgatgggtcactgcaaagcacctccagcacatggccaggcgaggtagccctgcagcccagggcctggagggcaggtgtgagctggcccgggcctgtccctccctggaatacagcttcccaggctcccacttatggagaagtctcctccacactatggaactgaatcctagaatgtggcttctgaggttcctacactcgaactgaatcctggaatgcggcttccaaggcttccagctatggagaagactccacactctggaaccgaatcctggaacgcggcctcccaggcccccagctatggagaagactccacactctggaaccgaatcctggaacgcggcctcccaggcccccagctatggagaagactccacactctggaaccggatcctggaacgcggcctcccagcctcccacttaaggagaagtctccacactctggaaccggatcctggaacgtggcctcccaggcccccacttaaggagaagactccacactctggaaccgaatcctgcacactccatcggtttggaatttcctttggctgctgctctaagtagccgctggtggatgactcagcttctgccagccctcgggtgcctggaggatgagggactgcacacagtgctcacccgcgttggctcctgagcccctgcaggtgtgggcggtgcccatagggctggtgctgggttgggcctgcagccctgagtcacaggtgaccctgggggcagagtggggccagtggccccaggaagaggatgtgggatgcacagctcagctggaggcgaactccaggcagggtcaggccgtgtgctcggaagtcagggcttagctggaggcaaactctgggcagtgctggcccgtgttggggaaccagttgcccctgggcccccgtgagactgctgggtcctcatccctctctgcctgaggccggagctgccctgggctgaggcacagggggatttgtggtggtgtttttttgagaaagggtctcgctttgtcaccccggctggagtgcaggggcttgatcacagctcactgcagcctcaacctcctgggcccaagtgatcctcttgcctcagccacccgaggagctgtgaacacaggtgtgcaccaccgcactcagctaatttttaaaatttttttgtagagatgaggtcttgccatgtttcccaggctggtctcaaactcctgggctcaggcagtctgcccgccttggcctcccaaagtgctgggattacaggcaagagcttccatgcctgcccagcagaaggcttttcgaaggaagctgtttcctgaggcagactcagccctgctcatggcagccaccagcgtgggggtgaacttgttctgttacttccatccccgtgggccaaatgctttggtaaaacacaaggccctgtgtttagctgtcttgacagtgaaaatggctgggaaggaaggaaggaacggaaggaaatttctctctccttctgtgcgtacccaggcacgtgcacatgcatgcagagtacgcacacacgcacgcacgcctgcacaaatccacgcatgttgccaagtctctgtgttccagccgtggtgtctgccccccggtgttctctagttcggcttctccgcatttctgtgaatgattccggcttcttggtgttcccagcagaactccctcaagtctgcggcggggctctgacggcggtggcttggctgacatggccacattgctgagcctgttgggggctttgcgttcctgttctggccgtttttggctcgttttccaggaacggtcgtcacgcgctcctctcctagtgcaggcatcattcctttcccattgatttgcagggttctctgtaagttctgaggatcccatatacatatactctctgtaagttctgaggatcccatatacatattctctctctaagttctgaggatcccatatacatattctctctctaagttctgaggatcccatgccgacatacatattctttccttgtctcatgctggtcattttttccattttcatgacaggtttggtgaacacatgtttccttgtcagatttttgttctgagcttgtgcctcccgaccaagatgctaaaccgggtcttgtgtattctccaaactgcactgtagagtgacggagctttgtgtctgggcctccatgccttctgacgtcacctgtgggggtgtgaaaggcagactctaccttgatttttcccagcacgccacaccggtggttctgtgcgctgaccgagcggctcggcttcccccaactccactgggcacctgccacacttttcctcatgtttttgttcactgtggttttgtcgtaagtcctggtgttggcctgaaccaatttctttttgtttgtttttgagacagagttttgctcttgttgcccaggctggagtgcagtggcgcgatctcggctcactgcaagctccgcctcccgggttcacgccattctcctgcctcagcctcccaaatacctgggattataggcacctgccaccacgcctggctaattttttgtatttttagtagagacgaggtttcaccgtgttagccaggatggtctcgatctcctgacctcgtgatccgcctcccaaagtgctgggattacaggcatgagccaccgtgcccagcctgatatttttagtagaaatggggttttgccatgttggccaggctggtctcgaactcctgacctcaggtgatcctctcaccttggcctcccagagtgctgggattacgggtgtgagccaccacgcccggcctcttgttcttttgaaacctgccctgacgttttttccatagtgcatcttggagtcagcgtgtctacttcctgtaaaaatcttactgtgattttgactagaatgtgttgaattcctgttttttttttgagtcagggtctctctgttgcccaggctggagtgcagtgggaccatcacagctcactgcagcctcaacctcctgggctcaggggatcctctcagctcaacctcccaagtagctgggaccacaggcacatgccaccatgcccggctaggtttttttttttttttttttggtgaacaccctggggttgcaccatgttgcccaggctggtctcgaactcctgggttcgggcagtttgctcctctcagcctcccggagtgctgggattacaggcctgagccactgcactaggccatgttgaatttctagattaatttggggccctcaggggcacagagaggagggctgggccagttggcgggaggagaggcccctcgggctgccgcattttcagtgcatggagatggcctatgttgggggaacacagagctcaccgggggtccctgcagggaggagaaagggtcaggcaggtgccagctcctgtccattggcctggggctgcatgatggcaggggccggtgaaccgatgacccctgggtgtcctgtgaccttctgtgtatgcggctgatgctgcagaaagtcgggtggcctcaggctcctgacggggctgcacttcctctgcctttcagattgtgttcagtgtggacccctccgagggcagccctggttccccagcagggctgggggccttacagtcctataaggtaggggccacctccaggaggcaggtggagggcagcccttgttccccggcagggctgggggccttacagtcctataaggtgggggccacctccaggaggcaggtggggctgggggtcttctggtcctaaaaggtaaggggctgcccccaggacatgggcggggcctccacactcctggtcctgtcccctccaggtgcacatccatcctgatgctggtcaccggaggacggctcagcggtctgatgcctggagcaccactgcagccagaaagcgaggtacagacctgggcccacacgctccccgcccgcccgggtgcagtgcccggcaccaccatgccacaggctaggcacatgcccagccgtggatctcctgcccccatgggcctggccaccttctccatatccaggccaatccagagcattctcctcactgtccctctgaagattggagttactgagagacgtaggagatggcctgatggcaccgtgacctgcccagagtcacctggttggtggtggcagagccacagcccagccaggcctccctgctgggacacgctcgtttatgccgaggccgtcagcacagagcctccacagtgaggcacggctctgcctgctgcctccacgcagcgcctggccgggccaagcctcagggtcacatctgaagggggcccggctggccctgttgtccgaagcccctggtgcgctcagccccgaggccccacgtgccttcttggcttcctgtgctccgtggcgtcttcgagtcggtgctgccggggacgctgtgtggatggggtctgtgagtgtgccctcggctccgtgtccggagccctgtggttcttggggtgtatctggccccacccccactgcgtggtgtccagggtggggcttcacggctgcagctgcgggagctgctgcccctgccttgtgctccagtggggccttgcctctgggcttggttcgtccctctctggaacattctttctcagctgctgtccgacccatggtggcatgacgtggccctggctgaagcagcccttgtgcggttgctgtggttgggtctgcctggccgagccggaagggaagggctgggagggcgtcagggtggcgtggcttgacccccgctcggtgatggtcctgcagcaaggcctctcccagcaggaagcgtccatcccggggggaggccggcgcccctcacgcagttggggttgcgggaggcagtgcgtgcctgaggcagccggtgcacagattccaagggcctggaatctgtttgttccattgacctctgatgtcacttgacttctcagaagcagccactccctgcactgggcgtttgtaggaaatgagctcctggaggagggggtggggaagttcccccattgcagggcacactcagccccaggaaggaaacgtgcctcgtccctgctgactccgaatcgcagtcagagtcgttctgcttgtgccgtgttgaattcccggcatccggcatccagactcagcctcctccccaggccacggccgccgtggccagtcggtcaagcccttctaggaacttcctttgagctggcgcccttgttcactgctgacgccactcagaggcttgtgcacgtgtcctgcttccaggcagagctgggaactcgcaccccgtcttctgcacgcggccgtggaatgtcgggatgccggcgcttccttcccgtgtgctcttggcggggtgggcttcttgccctgagccgcatgtcacagtttctgcagaagtttagggttggagtgggctgacctctctgcaggtgtccccagcctctgcctggggtctgcctcctactcccaggaccccctgtcccccagaggggccccaagctggcaggctcacactcagggcagcctcctttgttctgacttctgcacagtgggcctgggtggctgcccgcggctcgcttgcttgatgccagtgggtggagagggtgatgggcagagaggcaggtggtcaggcccccagtcccgtcctcacactctgtgccctctgccgccccccgccccacagggaaggtgctgagctactggtgcttcagtcccggccacagcatgcacgagctggtccgccagggcgtccgctccctcatccttaccagcggcacgctggccccggtgtcctcctttgctctggagatgcagatgtacgggccacccctgccagggcctgagcaccggtgacacctctgacatcagcggggtggaagtggtgggggtccccatgagccgggtgctgggggtctcgggcctcgagggctaaaggggtgctggtgcacttccccactgtctgctccctctggccacgctcagccctttcccagtctgcctggagaacccacacatcatcgacaagcaccagatctgggtgggggtcgtccccagaggccccgatggagcccagttgagctccgcgtttgacagacggtgagggcctgtccctgggccctgctggggtgggaggtgggggagcactgaggcctgaggtcctgagcagtggcctctccggctctaggttttccgaggagtgcttatcctccctggggaaggctctgggtgagtgccctgaatgccccagctgtgcccatcctggatcctggacccctgctcccaagagctggtagggaaccctgcagacatcctgcccctgccttgaccccggcccctgcacttccaggcaacatcgcccgcgtggtgccctatgggctcctgatcttcttcccttcctatcctgtcatggagaagagcctggagttctggcgggtgcgtctcccctgtgttctgggcggggtgggtgagggcagggctggagcatgaagcaggcagtggtcacagctcctgcttgccctcatcggatcggcggcgtgaccagggctgccgtgtccctgcctcttcctcccacaggcccgcgacttggccaggaagatggaggcgctgaagccgctgtttgtggagcccaggagcaaaggcagcttctccgaggtcggcacttggccggggctctgggcctgctgccccctcgtgcctcccctgcctctcacagcttccccaaggctgaccactggccctgaccatgggctccggcggctcccgctgcctcttcagggctcctgcgtttccttcctggccctgagtgttgcctcttatcttacaaagcccccagcaccgggtgggtgtggtaacagtggccctcctgtctgagtagccctagtcggccaccctggccctggggttccccgtgttttctgggaagcactgagcaggcgtggggtcagcctgggatccgtgccaggaagaagcttccagaacccgattggccttcctggctaggacgatccttcatcttggagcatgagacctgggtctccctcatgggggaggaaggggctgggggggggctccaggctcagcctcaccaactttccttccagaccatcagtgcttactatgcaagggttgccgcccctgggtccaccggcgccaccttcctggcggtctgccggggcaaggtgagctctccagggccctctgccctgacctggttgcctgttccctggtgggtgcttatggctccccagcagactctgggccctgggggctgcccggtcccctccttgggtcccacgagagcgactgctggccctgctgggagcgtgtcctgctctgggcctgggcaggcaggatgggagtttcctggccacaagagttggaggtggcgtctgggagctgtggaccccaagtggggtcctgacccacagatggagcttcctcccacccctggttggggacggagcctcggggaaggtggctgggctgggtgtgggcaccagggagaggagcccccacggccccaggcagctccctggtgtgtcccctaggccagcgaggggctggacttctcagacacgaatggccgtggtgtgattgtcacgggcctcccgtaccccccacgcatggacccccgggttgtcctcaagatgcagttcctggatgagatgaagggccagggtggggctgggggccaggtgagttacagcagggtggggctggggtaaggcggtctggtgactgagcccccgccccgtggccaagggagcccccgtgaccgagccgcctcgccccacagttcctctctgggcaggagtggtaccggcagcaggcgtccagggctgtgaaccaggccatcgggcgagtgatccggcaccgccaggactacggagctgtcttcctctgtgaccacaggtgcgtgcagtccggtggcaggcgcggcgccaggggacacgcccacaccccactgggcccctggactctccttccccacatgaggccccgtctcctccagagcctctccggctactcggggtcagcgtggggcccctgcagcagatgagggtcttcacttcggtgaactgaacccttgaagcggctgtgggcagggcagcagggctatggccaccccccaggttcgcctttgccgacgcaagagcccaactgccctcctgggtgcgtccccacgtcagggtgtatgacaactttggccatgtcatccgagacgtggcccagttcttccgtgttgccgagcgaactgtgagttcctgcccagggaggggatgagggtgttgtccccagaggagccagaaatgggtccacccacccccatggttctgcagatgccagcgccggccccccgggctacagcacccagtgtgcgtggagaagatgctgtcagcgaggccaagtcgcctggccccttcttctccaccaggaaagctaagagtctggacctgcatgtccccagcctgaagcagaggtcctcaggtgcggacgggcagcgctgggtgggcggtgtgggggtggcggagcgggcggcgtggggcgggcagcaccaggcgcccagggcggaggcgactcacctggctttgtgcgcttcccctcccacctccaaaggctgcctctccctcctagggcagggcccccacgggctgcaaccctcccctacaggcagagaacgccccaggcaaggatgccccccgaggctgagactccccccaatagcagggaggacacccacaggcaggaccccaagtgctgggactctcccccaagaggggctttgccacaggcagggaccccagctggggccccccgtgggcttcactgcgcactcgggtgcccctgcagggtcaccagctgccggggaccccgagagtagcctgtgtgtggagtatgagcaggagccagttcctgcccggcagaggcccagggggctgctggccgccctggagcacagcgaacagcgggcggggagccctggcgaggagcaggtacagttccagggccttgggatggacacagaccctctgtctcctgaggccaacccgaccccgcccatctggcctcaggcacctccccacacacccctgtaaatcccctgcctggcaggcaggcgggcaagcgggcgggggatcccagctgcctggctgtctgtgggtcctccaccccacctcacccacaggctgctggctcccaggtggtgcatgccctggccctccgcgggtgccccccacatcactttggttctctggcgggtcagcttggctcagtgcactcaaggtcgggtgcccctgccactggctgcgcttgaggctggcctttctccaggaatgtgctgcgggtggaacccaggttccttcttccttggggccttttgccccagaagcccataattcctcaggccaacccgaaattttctccctgcttcctgctgggagccattcccctcttcctgcccatccctgcccttcaggcccctggagtgagctccaggtgcaggcaccaggcacctgtgtccccttcctgccagcccctcgctgtggtcggactgtcttccctggacctgctcttacaagtcaccacctgcgagcctcatgagccgctggtgtgacttggacaggaccaagttgtggcactgtcaccggggtgtgctgtgcccccctcccccgacctccatcttggctcagggctccttgggaccatcttccctgtgcgtccaggtgctttgggaccccagagtgtgtggttggggtctgtgtgtggttgtgagctgtgtcctcctcaggcccacagctgctccaccctgtccctcctgtctgagaagaggccggcagaagaaccgcgaggagggaggaagaagatccggctggtcagccacccggtgcgtgagctgtccctgcacctgtgccgaccaccatagacacgcatgggaacgcagccgtgggtgcccccagccacggctggtcccgatgggaccagggaatccacccccaggagctgatgtccagggcagctgtgatgctgacggccaggggctcaagtgtgtggtttcttctgcagggggctcatgagtcccagctggaatcaggccccacccttgggcaggtttggcatggggcctgcagcactgggcttggccctggcatttccctcaagtgtggatgcacacctgcctcatgtgagggacacagcccattcctagccttggatcaaagaacggagttatagccggagccaggaagccccctgcctgctggaaaaccccaagtgtggcggcctttgtccatgtcccttggcttctgggaagaactgggtggtgcccaggcagggctggtgccatcaggaagtgggtggctgctgaggggcctgggctggcgagggcctgggtggggagtgcctgggccgcccctgccttggtttccacgtttccgtgttggtctggggtgtgtagagagatgggcactgctcatccggaagcccctccttgtgcgctgccatcctgggagcctcagccgcatccgctgtggggcagggggcttgagggaggaggagagagacgggccatgcaggacccctggcttgaggcagagccaatctaccctttgcccattcactgctctcagttccctgccagcctctcactgtgtgacctcagacgggcccagccccacagctttcttcccgcagcccctccctatgtccatccagccagccagtttctcaggcagcagccccacctcggcagtcactgtcccagggaacgctcaatgttccaaggaaggctctgcagccccagggaccagatgatgaggctggccctgatggagcctcgggcctgtgtcctgcaggaggagcccgtggctggtgcacagacggacagggccaagctcttcatggtggccgtgaagcaggagttgagccaagccaactttgccaccttcacccaggccctgcaggactacaagggttccgatgacttcgccgccctggccgcctgtctcggccccctctttgctgaggaccccaagaagcacaacctgctccaaggtgccctggcttgcagaggccacccaccctgagggcagtgctgccgccgcgtgtggggtgggggccatctgggtccaaggtggtctctgttctctagagaaaaaggggcagatggggacagacgccccttcctctacaggcttctaccagtttgtgcggccccaccataagcagcagtttgaggaggtctgtatccagctgacaggacgaggctgtggctatcggcctgagcacagcattccccgaaggcagcgggcacagccggtcctggaccccactggtaaatggggccccaggtgggaccctcagactcctgcgtggaaggcagtgtgggccagagtcctgggctgcttggggtgggcatcctcgggccctgcttggccccgcctctctgttcccctatgggagtgatgggggcctccacctccaccaccagcaccagcagcaccacctccacctccacctccacctccacctccaccaccacctccacctccaccaccacctcctccaccaccaccacctccaccaccaccaccaccaccaccacctccacctccaccacctccacctccaccaccaccacctccacctccaccaccaccacctccacctccaccaccacctccaccaccaccacctccacctccaccaccacctccaccaccaccaccaccaccaccaccaccaccaccaccacctccaccaccaccacctgcaccaccacctccacctccaccaccaccaccacctccacctccaccagcagcagcatcacttgttggggagaccctgtgcaactccatgcacagccctgtccctgccatagccccgacccctaagcacagccctgtccaactgccacacgtcccctgcctcccatgcatggtcctggggggtcaactgcacacgccagggtcctagggtcctagacccctgtcctccctgtttctgcctctgtttggggtggagtccaagtctccagaggcggaagcatctgtgttcgtgtgttaatgaacagcccctacagagttcccctagttcacccaggggggaacctagcctgttgggacgaccccagatcccttctgggcttggtactcactgggatatcctcatgcctgcacccagcctacggctctgagctcctgagtggggctttggcctgcccgccactgttccagcccccatccagcaggctggtgtctcctctgatgcccccagcacccaggcgtgtacctgcctgggttttcccgccctggtctgaggtgggtgaggcctggcctccctagccagccctgcccccccaccccagggaactttccagatgctctcgaccagctttgtggctctacatctcttcatcaggaagaacggcgccggatcccaagctgaccgtgtccacggctgcagcccagcagctggacccccaagagcacctgaaccagggcaggccccacctgtcgcccaggccacccccaacaggtagctgactcctgaaccgtgtgcagcctacgacttggtgggtccctcagtggcttcacgaggctaactcttgagtgtggccggggctgcccctgtggggagccatctcatggtggggactgctcccggttctgcaccccgcagttgtcctgagcagctctccaggagttcctggaggaagggcgggcagggcggtgggactctcagtcctccaccccagcgccactctgagccatgctactcccacaccaggagaccctggcagccaaccacagtgggggtctggagtgcccagagcagggaagcagggccagcacgccgtgagcgcctacctggctgatgcccgcagggccctggggtccgcgggctgtagccaactcttggcagcgctgacagcctataagcaagacgacgacctcgacaaggtgctggctgtgttggccgccctgaccactgcaaagccagaggacttccccctgctgcacagcaagtggccctggcgtggggaacagccggtggggtggggggcaggggacaaaatgggggctgtgccgggtctgattgaagctccccgcagggttcagcatgtttgtgcgtccacaccacaagcagcgcttctcacagacgtgcacagacctgaccggccggccctacccgggcatggagccaccgggaccccaggaggagaggcttgccgtgcctcctgtgcttacccacagggctccccaaccaggtagggcacctgcctggctgctcctggcagcgccccaaccgcacgcagccctgggagtgagcagcaaagccccaggcccccctcagactcaagtctctgtctccaggcccctcacggtccgagaagaccgggaagacccagagcaagatctcgtccttccttagacagaggccagcagggactgtgggggcgggcggtgaggatgcaggtcccagccagtcctcaggacctccccacgggcctgcagcatctgagtggggtgagcctcatgggagagacatcgctgggcagcaggccacgggagctccgggcgggcccctctcagcaggctgtgtgtgccagggctgtggggcagaggacgtggtgcccttccagtgccctgcctgtgacttccagcgctgccaagcctgctggcaacggcaccttcaggttggtgcctggccactacagttcctgctgggtgtagccccaggtgatgggctgagggggaaagggcaggcccttgtcctggtggcaacgcctggcagacgtgtgcagtgggccggttgtctcacaggcctctaggatgtgcccagcctgccacaccgcctccaggaagcagagcgtcatgcaggtcttctggccagagccccagtgagtgcccacggaggcccccagcacacccaacgtggcttgatcacctgcctgtccagctctggtgggccaagaacccacccaacagaataggccagcccatgccagccggcttggcccgctgcaggcctcaggcaggcggggcccatggttggtccctgcggtgggaccggatctgggcctgcctctgagaagccctgagctaccttggggtctggggtgggtttctgggaaagtgcttccccagaacttccctggctcctggcctgtgagtggtgccacaggggcaccccagctgagcccctcaccgggaaggaggagacccccgtgggcacgtgtccacttttaatcaggggacagggctctctaataaagctgctggcagtgcccaggacggtgtcttcgtggcctgggcttggtggtgggagttgagggacagggagttggcagaggcccctcccagcctgccatgtgacactgtacttcctccacggtgggctcagccctgccctcatcctcacagccgcagccaagctgcagttggtaggggatccaccgacacaccaggctgcctgggctggtctctgggttgggagctgccccaggtgctgaggagggcagctccctggctggtgaggcccctcccagaaccacccttggactgagctctggggagggatggtaccaggtgggtgaggggggctgcctggggagggaggggttcctatggggcgtggcgaggctggcccagccctctccccgcccatatatgtagggcagcagcaggatgggcttctggacttgggcggcccctccgcaggcggaccgggggcaaaggaggtggcatgtcggtcaggcacagcagggtcctgtgtccgcgctgagccgcgctctccctgctccagcaaggaccatgagggcgctggaggggccaggcctgtcgctgctgtgcctggtgttggcgctgcctgccctgctgccggtgccggctgtacgcggagtggcagaaacacccacctacccctggcgggacgcagagacaggggagcggctggtgtgcgcccagtgccccccaggcacctttgtgcagcggccgtgccgccgagacagccccacgacgtgtggcccgtgtccaccgcgccactacacgcagttctggaactacctagagcgctgccgctactgcaacgtcctctgcggggagcgtgaggaggaggcacgggcttgccacgccacccacaaccgtgcctgccgctgccgcaccggcttcttcgcgcacgctggtttctgcttggagcacgcatcgtgtccacctggtgccggcgtgattgccccgggtgagagctgggcgaggggaggggcccccaggagtggtggccggaggtgtggcaggggtcaggttgctggtcccagccttgcaccctgagctaggacaccagttcccctgaccctgttcttccctcctggctgcaggcacccccagccagaacacgcagtgccagccgtgccccccaggcaccttctcagccagcagctccagctcagagcagtgccagccccaccgcaactgcacggccctgggcctggccctcaatgtgccaggctcttcctcccatgacaccctgtgcaccagctgcactggcttccccctcagcaccagggtaccaggtgagccagaggcctgagggggcagcacactgcaggccaggcccacttgtgccctcactcctgcccctgcacgtgcatctagcctgaggcatgccagctggctctgggaaggggccacagtggatttgaggggtcaggggtccctccactagatccccaccaagtctgccctctcaggggtggctgagaatttggatctgagccagggcacagcctcccctggggagctctgggaaagtgggcagcaatctcctaactgcccgaggggaaggtggctggctcctctgacacggggaaaccgaggcctgatggtaactctcctaactgcctgagaggaaggtggctgcctcctctgacatggggaaaccgaggcccaatgttaaccactgttgagaagtcacagggggaagtgacccccttaacatcaagtcaggtccggtccatctgcaggtcccaactcgccccttccgatggcccaggagccccaagcccttgcctgggcccccttgcctcttgcagccaaggtccgagtggccgctcctgccccctaggcctttgctccagctctctgaccgaaggctcctgccccttctccagtccccatcgttgcactgccctctccagcacggctcactgcacagggatttctctctcctgcaaaccccccgagtggggcccagaaagcagggtacctggcagcccccgccagtgtgtgtgggtgaaatgatcggaccgctgcctccccaccccactgcaggagctgaggagtgtgagcgtgccgtcatcgactttgtggctttccaggacatctccatcaagaggctgcagcggctgctgcaggccctcgaggccccggagggctggggtccgacaccaagggcgggccgcgcggccttgcagctgaagctgcgtcggcggctcacggagctcctgggggcgcaggacggggcgctgctggtgcggctgctgcaggcgctgcgcgtggccaggatgcccgggctggagcggagcgtccgtgagcgcttcctccctgtgcactgatcctggccccctcttatttattctacatccttggcaccccacttgcactgaaagaggcttttttttaaatagaagaaatgaggtttcttaaagcttatttttataaagctttttcataaaactggttg

SEQ ID NO: 526 - DNA, 43888 bp, Homo sapiens
  source 1..43888: mol_type = genomic DNA
aaaattagccgggcgtggtggcatgcacctgtaatcccagctactcaggaggctgaggcaggagaatcgcttgaacccaggaggtggaggttgcagggagccgagatcgcaccactctattccagcctgggcgacagagcaagactctgtctcaaaaaaaaaaaagaaagaaagaaattaactctggctcctagaaggagccctatatctcagcaggacactcagtcattcaacagacatctgtcaagcacctgctgtatgctggagctgtgggtacgtcagcaattagaggaagagggcaggggtacaggagttcctgaccaccccaggccagcacgctcctatagcagctggcaaggagcagatgactcagacttcagctcagtccacaggacagccttttctggccactgctctcaggagatgagatgtgtggctgcaaaaggtaaactcctggctcctgagcaggctctgggcaatctgctcaacgctctgtgcctcactttctcacccagaaagtgtggacaatgagaggacttatctggctgggcgcggtggctcacgcctgtaatcccagcactttgggaggccgaggcgggtggatcacctgaggtcaggagttcaagacctgcctggccaacacggtcaaactccatctctactaaaaatataaaaaattagccgggcttagtggtgcacacctgtaatcccagctacttgagaggctgaggcaggagaatcacttgaacccaggaggtggaggttgcagtgagccaagattgtgccactgcactccagcctgggcaaaaagccaaaactctgtctcaaagaaaaaagaatcatggcagaaggtgaagtctatgttagtcccagttcccaggtcgtacatggcggcaggagaaagagagagagaaggggaaactgccacttttaaaccatcgggtctcctgagcactcactgtcagaacagcctggaggaaactgaccgcatgatccaaccacctccctccaggtccctccctccacacgtggggattacaattcgaggtgagacttgggtggagacacagagccgaaccatatcagcatgtatggggggcactgaaacttgtgcttggtgcccattcattcaacgagtgtgtgtggctggtctcctcatcttcaactccctgccgagtctcagataggcagcctgcagttccttcaccacaacaggcacatggggctgggtgccagtgagtgctggggcttctccgagcactatctcacacccaggagcgtgggcacgcatggcattcgcatgtgccgtcagtggacattaaacacagccatgaagaagccacgaagaagtgctgcctgccggccgtgcgcggtcacgcagcgccaactccctcctggggccttctggggccttctggggcatgggagctggggccgcctgagacaaacatccgtgacgctgggctgaccccacagaacggtgcgggcctcgctcttggagtcagccctgctgccagccagtgccgggtgctggggactcagggaggcccgccgggaccactgcgggacagtgagccgagcagaagctggaacgcaggagaggaaggagagggggcggtcagggctctcaggagccgggtcctgggcaaggcgcagccgttttcaaattttcaggaaagcggtcggctcacactcgagcagtaaaaagatgcctctggggaggaggcccgtgcagctctccgggcaatggtggtggctcggcctagagaggcggtagtggaacgcagaccctggtgggggaatgacatcaagggaggagacgggcgggaccccagatttctgcctgtgggcgatggaagtgaggttcactggccagcggagccggacacagaacgcgcaaaacgccgtgtaggcctggaggagccgaagagcaggcggaccccctccgcgggggaacagtttccgccgggagcacaaagcaacggaccggaagtggggggcggaagtgcagtgggctcagcgccgactgcgcgcctctgcccgcgaaaactctgagctggctgacagctggggacgggtggcggccctcgactggagtcggttgagttcctgagggaccccggttctggaaggttcgccgcggagacaagtgagcagtgagtcgcagtgaccctacaagtggttcttttacccgagcggctcgtaggcgcgttgcggtttttcgaaactacagctcccggcaggccccaagccgccctcggggccgcgggtcggcggattggccgcgctgcattttgggacctgtagtttcctgcgctcgtggcgctggcgccgcggcgttggctgagcccttgaccggggctggagggaagggccgacattcagtgtgtccgcgtctgttctgttagtcccagttcccgggcgggattgaggcttagagaagttgagtgatttgctgagggctgcacgggttggcatcccggcatgctctttcgctactttggctgcatctggttgcccacccgggcggatggggaatggactccagccagccaggagggcagagggctggagaggcagggccggaggttcagaccctccgctctgacgttgcgcctggtgaggccgggaggggtgccgcttgcctcttcagccctcacgctcttgtggaagtcgcggaattactgcaggcggaacttgcagcactgtgggcgtcttttccagagaaggacggagttgtggggcgggaggataaggcaaggcccagccacttcgcatcttcgccccgccagctcctcgagatgggatataccagggttgctctccaaccctctccgcaggagggactgatggaaacgcctgggaaagtagcccggtacccacaaaggctgtctacaaacagagtcttactgtctttcccaggtctgtgccatagggattctcgaagagaacagcgttgtgtcccagtgcacatgctcgcatcgcttaccaggagtgcccgagaccctaagatgttcggagtggttttttcgcacagacccgaatagcctgcccctcagccacgctctgtgcccttctgagaacaggctgatatgcccaagatagtcctgaatggtgtgaccgtagacttccctttccagccctacaaatgccaacaggagtacatgaccaaggtcctggaatgtctgcagcaggtagagcacaggccccgaggaaaggactgcgggtgggtggagcttcagccaggacggggtgtgcttccctctcccggcccattccagccaggcccctccgggccagaggcagcgtctgtcataaaaagggctggtgttccaggtggggtcagagagaggattgacaagtaaaaacgatcgtcctttgaagggggccggcccctccacacctgtgggtatttctcatcaggcgggacgagagactgagaaaatgaataagacacagagacaaagtatagagagaaaagtgggcccaggggaccggcgctcagcatacagaggacctgcaccggcaccagtctctgagtttcctcagtattcattaattactattttcactatctcagcaagaggaatgcggcaggacagcaaggtgatagtggggagaaggtcagcaagaaaacgtgagcaaaggaatctgggtcacaaataagttcaagggaaggtactatgcctggatgtgcacgtaggctagttttatgcttttctccacccaaacatctcggtggagtaaagagtaacagagcagcattgctgccaatatgtctcgcctcctgccacagggcggcttttctcctatctcagaattgaacaaatgtacaatcgggttttataccgaaacattcagttcccaggggcaggcaggagacagtggccttcctctatctcgactgcaagaggctttcctcttttactaatcctcagcacagacccttcacgggtgttgggctgggggactgtcaggtctttcccatcccacgaggccatatttcagactatcacatggagagaaaccttgggcaatacccggctttccagggcagaggtccctgcggctttccgcagtgcatcgtgcccctggtttatcgagactggagaatggcgatgacttttaccaagcatactgcctgtaaacatattgttaacaaggcacgttctgcacagctctagatcccttaaaccttgattccatacaacacatgtttctgtgagctcaaggctggggcaaagttacagattaacagcatcttagggcaaagcaattgttcagggtacaggtcaaaatggagtgtgttatgtcttccctttctacatagacacagtaacagtctgatctctcttttccctacagtccttgagggtgacagacttaggagtgccttgggggcctctctgaggagcagctgatattcacgggtcaggaggaagcatttccattagaggggcagccggtggccagcctcacttggaaggtctttgaacctcgggggtgcagggaggtggcagtggtgcaggttgccttctcctgggttccttgaggtgccctcttgtacccggctcacacccttcccctccccgagtttcctgctcaggttcccgtctgagagcttgtatgtaggacgtcagataggacagcataaatgtttggatccagaaacgcagaacagtttcctattttgagacttgacacctaattagtcatcttactatttaagctgaaaaatagtgtcgtgttttgggtaacgttctgcaaatcgtttgctaatggcggctgagttgcttcacgccctttagggcaagagtgggacttgcctgtggacttctccgcggtcccacagggctctcgccacctggcagtggcctctgcatctgcaaagagctgcccgctggctgccgaagcttgtctcagggcagcttgtgtggcctcgcctcttcctggcttccccgtaacccttgctccgaactccgttcagaaggtgaatggcatcctggagagccctacgggtacagggaagacgctgtgcctgctgtgcaccacgctggcctggcgagaacacctccgagacggcatctctgcccgcaagattgccgagagggcgcaaggagagcttttcccggatcgggccttgtcatcctggggcaacgctgctgctgctgctggagaccccataggtgaccctagttcccaggcctctcctggcctcctgtggggatggttggcaagggatggcgctgagggtggggtgggcccatggggactcctgccgtctctcaagcagaactcaaggagaattttttagctgctgtataatttctcgccatcgtgggtgtaaacctagggttgggcttttttgctgaattagggcacggcagatgcccacttcacccatttttgataaaccagtatctggggtgtcagattcttggctgtctgcagggccgagttagccgaatgccacctgcctttgatacgtgagaacgttgtctgagaaccgtgacttctgtgcttgcttgtgtctggtcagcttgctacacggacatcccaaagattatttacgcctccaggacccactcgcaactcacacaggtcatcaacgagcttcggaacacctcctaccggtgggtcagacgagtttacacctgtctcggggtcctcaagagaaccagcttggcatggtgctgagtccacagccccatgctgtgctgtggtggagggtggtggtctttctagacgctcccccgaagtgtgcagagcgctggtgcccaggggtggggtgcggcctgggctgcctccaatgcccattacttgtgaggaagcagctttgcatctgtgtgctgaccttgggcgggcgtcctgagctcctcgcaggtgctgttgtagcagctgtgcagtaggtcagggctggcccccagtgcagctttgcacatgaagtaggaggaggccctgctgcttgtcagagcccagcagagtcttggtgttctgtcgggttcctgtggccggaccagtggcagggtgctgtggaagctgtcgaatctcctccctctgtccagtacccccgctcgtcttctagctccctcctacgcccgggccacgtttcagttatgctcacttcctctgaccgccgaggctcctgcgtgtctccatacagctcacgctgcagggccacgctgtgggtgttggagacagctcctcctcgacccacggtgctctctcccaccaggcctaaggtgtgtgtgctgggctcccgggagcagctgtgcatccatcctgaggtgaagaaacaagagagtaaccatctacaggtaggctcctgggctcccgctccggctcagtgtccgacaggcgagtgctgctgggtgtccagagccccaggctgcgctcccgctgggctagggtttgaagttcactgggggactgcaggggaggacctggtgggggtggggactggcttcggtcctttcttggccgtgcttcagctgcgcactctgcccttcctcccacagatccacttgtgccgtaagaaggtggcaagtcgctcctgtcatttctacaacaacgtagaaggtacaagcagctgggtgggaccagggtcgggttggagtgtgtgcagcctctcagggtggagctcagtggtgtcacagcctggttgtgcttgcccggtggggcggccagtgcggccatgtacctgggccctgtcttctgactcggggccacccatgttagacttctgtgtggaagagctcacacagtggtctgagacagccagccggcaagactgcctctggctggtgcctggggccttggattttgggaaggctccctccatttcctgatgagagggtctccctgcacctaacctgctggtgcaaacagtaggggttttgctgaacaccggctttctcttcggggactttgttgcttgcccagcagcaggtgctccagtgaccggccctcataccatcttgggagggtgtcctggaagccgtgtctggcctcccgcgaccctgccccgtgtgtctttttcctgtgctgaccttgctgcggaaaattatggccctgagtgtgactccaggctgagtcctgtgggtccaacacgggatgccttggggcctcttctggagacgggatgtgagtgacaggagccggccggggcagcttgccctgtgactgcacgtggccacagcctgtgagggccgggggtgcttctccacccacgtggctgcccctcgggtatgtcaagggcttctggggctcatcacggggtcctagagacagtggcagggtgcacccccgttggctgcccttacagtttctgtgacctgagggtggcatctgtgcagtcggcgcggtctgtgcttctgtgggatcagggttccctctgtttcctgcctcagttggggctcaagcctcaggtgaggtggccccggagcactcagaaggcatcggcggtcctgtgggctgctttctgcactcacgtttgctgagtgctcagtgtgccaggactgaggaccctgaagctgctcttgtatttagggcggcgctcccctggcagagactgagccaggtggtcccgcatgacccactaccaggcgtttctgggccctggcccttggagggacagggtgggcggaacatgggcctgcagggaggctcccgcttactggaggcatgtgctgtgttgctggagacatcctctgtgttgcttcttgttcgctgtggtttttggtctggtggcaccaaggaccctcagtcatcttgatgtgtggttgtccaggcctttttgttggtcctaagaaggggctctgcctttgtgcccccaggttccctgacaggagctgccggctcgtcccggtgatgcctgcaggacgtgactctgggacggggggttgggcagatgtgctgatggaaattctcaagcaggcgtcatttccgaggtcctcacctggatttccaggacaggagtgcctgctgggtgtccccagtcccatgcagcgggggtccttgggatagcatggaacgctgagcatgggcctggccggccgtggtcctggacaagggcagtgccccggtggctgctgggcctgggacctggtggggacgctgggcctggtacctggtggggatgctgggcctgggacctggtggggaggcctctgactgcctcctggtgctgcttccgtctgtgttaggcctctgggtattggggcccccatctgtctcctcctccaggcctgtggactcagaccaggaagacacaggccagcccctgcctgtcccccttggcttgggctctcactgcccgacctggcgggaggttgcctagccgtgaaccttcgcaccctgtctgccaccggacaggctgtgagggggtgtctgcagcacctgcaccggcctgagcatcttcagagtgggctgcagctcctggaggggtctgagaggaagggaggcaggtattttgggcgaatgaggagacagctggagagctggcacccttcctggcctgcgtcctgtgaggactctggttggggacagcaagcttggggtcagcctggggcagagcctctgggacggccccgcccctcgtgccccttcccctcgcagctcctgtcctcgccccgccctcagctctccgccaggcaaggtttggcaagtgccgctgtgcggcagtgcctgctgattggctggtctgttgctatggtgctgcccaggggtgtgcttttcctcccctgccttccctgctatccctgggagtatctggggttgggtcatcgctggtgtgtgtgagtgtgtgtgtgtgtgtatgtgcacgtgtgcatatgtgtgcgcttctggcctctgcagctgagtcctggccctcggggggcctggcacctcctggggacaggcacaaagcagccatgatggagtcgggagctgggggaggccccattgccccacgtggctgccctgtgactctggggtgcttgttagaagaggtatctggttctgtctgtgtttaagcaactccctaaggaattcttgtggttccagtttggggggcctgtactgtagaggcaagggaggggcaggacatcccccagactctgacttctgaagccttttctgcccggggcctctccgccagtacaggcagtgtcctttgccagggctgccatgctgcagaggggagtgggccactgtttagcccaggaaaacctggctctcccttagctggaagttctgggcctgttgtggttggcagggaagctgagtgacggtgctaatcacaggggcacctgcaggggtttgtgggagatgcctctgtgggttggggcgataggctgaggggctgttcttccctgccctgaggagggctgagtgtagccgccactcctgtcctgtcttgggctgtctcggagaggatgcgtagaaccctcgggatcctgctggcctccgtctggtccaccctgaacctcaggccttctgggggcagaggaggattccctcaggatcactcgggtgggggcctctcttgggcacctgagaccctcagtgggtgctttgtggcgcgttcacggttggtgggggacgcccagccctgcccgccgtgtaggagccgttctgtcctgggcatccccctgtggtctgggacttagtggaccctgagggtgtgtgtttacccctgcctcacacctgcagaaaaaagcctggagcaggagctggccagccccatcctggacattgaggacttggtcaagagcggaagcaagcacaggtgagacccctcagtgaggccacgaccactgtccttccatggcccagctctcctgtgacctgtggaggcccggatatatttcttcacttttctttgttcctttttaaattatgaaactaaccaccattcagtacgaaaaagtttaagcagctctgaggaagatagagtaaaaaattgtctccctcttccctggccctcagccatccccggtggccaccgtggagtgtggacggagccctgcaggcctgtgtctgtgcggaagcacgcgcagttttgtctgcacagactgtcctgcagttggctgttttcactcagcgttgtgggtatagcttcccatgctggtgctggcagctcggccttgttcttttgaggacagcagatgtctcctatgtctacctcttacagcttcagagattcaagttataataaagctcttcttatattgagggggaaacctccctcccccttttttttgaaacagggtctcgctctgctacccaggctgcagtgcagtgtcacagtcttggctcactgcagcctcagcctcccaggctcaagcgattttcccacctcagcctcccaagtagccgggactgcaggcacacaccaccatgcctggttaatttttgtattttttgtacagacagggtctcactctgttgctcaggccagtctcctgagctcgagagttccacctgccttggcctcccaaagtgctgggattacaggcgtgagaccccatgcctggccagctctttttttttttttttttttttttgagacggagtctcgctctgtcgcccaggctggagtgcagtggtgcgatctcggctcactgcaagctccgcctcccgagttcacgccattctcctgcctcagcctcccgagtagctgggactacaggtgcccgccaccacgtctggctaattttctgtatttttagtagagacggggtttcaccgtgttagccaggatggtctcgatcttctgaccttgtgatccgcccacctcggcctcccaaagtgctgggattacaggagtgagccaccgcgcccggcccagctctgctttttcttagtggttctgcgttgtgtttgtttctatccaggaatagggttggttttacttttccatcgagtttttaaagagacgacgatttacatggtcggaaactcacgaggactccccatcccttggtcggaaactcacatggactccccatcccttggtcagaaactcacgtggactcccatccatcccaggcagcagcttcccacctgggccctacgtgcaggatgagggctccttccgggtcagaagacatggcggcctcggggcaccgtcccctgcatggggtgctcacaggatcttctcctctctccttcccagggtgtgcccttactacctgtcccggaacctgaagcagcaagccgacatcatattcatgccgtacaattacttgttggatgccaaggtgggggctcagtcctgtagctgacgactcctgatgtccaggggtgtccctgggcttgggaacagctgtccgagcctttgctgcttcagggccttagatcagcaggcctgggtgggaggactcacctctgtcactgggcaggggctcaacctggccagacacacttgtgagcagccccaggccacaggtcagttttctgagcagtctgggagcgggcaggctggtgggagtgaggagagacctccaggctgtggtccataggccagtgcccgctcttgatcctgacagctcaggttctctccttcacgtcaggccatgggaggcaccgagaacacaggaagcccactgactcccctcttcccagcgcgtgcccggccccacactcactccccctcccagcatgtgcccggcttcacactcactcccctcttcccagtgcatgcccggccccacactcactccccccacagcatgtgcccggcctgacactcactcccctcctcccagtgtgtgcccagccccactcccttccgccccgtgtgcccagccccacgctcactccccccgccagcatgtgcccggccccacactcaactcccctcctcccagtgtgtgcccggccctgctgccctcctccccatgtgccctgcttttgtgccccacactttttacttagtgcaggtgggatcacacgccacgggtcaatggtttgtgtgttcacgtgacgatggcgtggtgacgtttccagatcccgtcgttggttcgctcattctcggggtgtatatttattgagagctcatcatgctgggtgctattccaggcatagcaagactggcttcactcacatggagctttgattctagtggtggggacaggtggacagcaaaagagtaagcacgtgagctgatgatactgaagggaaatagagcagagggaggaggcggagaccgagccaagcgggcccaagtgcgatgtcggcgggaggtggggaatgctggtgggtctgaggggagcctcagcaggtgcagcagagcaagggaagaggtgagtgggggcggctggggggccgactcctgggaagctgtagcagaaccccacagagagctggtgaggtttgccgtggttgtgggtgactcggtgctttgagccctggctgcccctgggaaccatctggagagcttctaacccaaccaggcccctccctgggacagttatatcacagctggtaagccgagtctaacactttcacggaaacgcagaagatctaaaacagcaagatgaccgtgaagaagaacagagctggaggactcacctcgctggtttcaagactcctctaaagctgcaggagtggaggtggagatggcccagctcaggcacaggcctgcaggccatggagaaggcagcaagctcaagctgacccacacgcatgtggtcattgttttttttttcagttggaatctcactctgtcacccaggttggagtgcagtggcaccatctcggctcactgcagcccccgcccctaggttctagcgattctcccacatcagcctcccgagtagctgggattacaggcgtgcgccaccatgcctggcccttggtgattgttttttgacaaacatgccaatttaattgagagaggaaatgaaggttgatttctggttttctgaaaaaatggtgctaagaacagctggatatctgttcggaaaacagtgaatcttaactcttgttttaccctgtataaacctaaatgtaaaagctaaactaaaagttatagaaaggaacatgggggaggtctttgcaactttggggtaggcagagatttcttagtatggatacacaaggcactagccatgaagaaaaacattaaaatttagacttcaccaaaatttaaagcttcaactctgtggaagagttgagaaaatgaaaaagcagttaaagaaagggagaaaatacttctttcaaaggacttaaaaaattttttcagccctcctctgatttgaaaggacctttgaccagagtatgtaaaattctcccataactaagcaaacaacccacttaaccactgggaagggatctggacagacgtttcaccaagatgggtggaatggccagttaaccactgggagagcatccggacagacgtttcgccaagatgggtggaatggccagttaaccactgggagagcatccggacagacgtttcgccaagatgggtggaatggccagttaaccactgggagagcatccggacagacgtttcgccaagatgggtggaatggccagttaaccactgggagagcatccggacagacgtttcgccaagatgggtggaatggccagttaaccactgggagagcatccggacagacgtttcgccaagatgggtggaatggccagttaaccactgggagagcatccggacagacgtttcgccaagatgggtggaatggccagttaaccactgggagagcatccggacagacgtttcgccaagatgggtggaatggccagttaaccactgggagagcatccggacagacgtttcgccaagatgggtggaatggccagttaaccactgggagagcatccggacagacgtttcgccaagatgggtggaatggccagttaaccactgggagagcatccggacagacgtttcgccaagatgggtggaatggccagttaaccactgggagagcatccggacagacgtttcgccaagatgggtggaatggccagttaaccactgggagagcatccggacagacgtttcgccaagatgggtggaatggccagttaaccactgggagagcatccggacagacgtttcgccaagatgggtggaatggccagttaaccactgggagagcatccggacagacgtttcaccaaggtggatggaatgaccagttgagcacatggaaagtcgcccagcatctccagtcataggagaaggcagattaaagccacggggagccgacactgtggtcccactggcatggctgaaattcagaagccctgagtgtggcatgaggatgtggaacagctggatctcatccatcgctgtgaagttgtgtagccactccacaaacgtgtggcaaacagccgagccgggagaagggaagacgtgttcaaagattcatatgtggccaggctcagtggctcacgcctgtaatcccagaactttaggggccaaggctgggggatcgcttaagcccaggagtttgagaccagcctaggcaacatagggagaccccatctcaaaaaaaaaaaaaaagaaaaaagaaaagacttcagtgtgcaggtttaccagagttttgtttgcagttgccaaaactgggaagcagcccgcgtgagcccatccacaggtgaatggacagaccgtggtacccgaacactaacagcagccacgggcgtggactgtggtcacacagcagcagggagccgatgagtctcggacatgctaacccagagaggcccattgaggaggacctactgttttttgtgtttttgttttttgttttgaaatggagtctcgctctgtggtgcaggctggagtgcagtggtgtggtcttggctcactgcagcttccgcctcttgggttcaaacagttctcctgcctcagccttccgagtagctgggactacaggcacccgccaccacacccggctaatttttgtattttcagtagagacggcagttcgccatgttggccaggctggtcccaaactcctgaccttgtcatccactcactttggcctcccaaagtgctgaggttgcaggcatgaaccaccgcacccggctggacctactgttttattccatttatgtgacactctattaatagaaaaggcaggggtggggctggtggttatatggtgcacataactgccagaactcagtacacttaaaatgaacatcttaatgtgtgaaatttttttttttgagacggggtcttgctctgtcacccaggctagagtgcagtggtgcgatctccactcactgcaagctctgcctcctgggttcacgccattctcctgcctcagcctcccgagtagctgggactacaggcgcccgccaccacgcctggctaattttttttttttttttgtatttttagtagagacggggtttcacagtgttcgccaggctggtctcgatctcctgacctcgtgatccgcctgcctcggcctccgaaagtgctgggcttgcaggcgtgagccaccatgcccggccaatgtgtgaaaatttaaaagtaccaaagctggaccccaccccagattgctcccatgacactctgtgggtgggacctgggagttgggttttgttttgttttgttttgtttttgagatgaagtctcactctgtcgcctaggctggagtgcagtgacacaatctcggctcacattaacctctgcctcccagatgaaagcgattctcctgcctcagccttctgagtagctgggattacaggcacacaccaccaccccctgctaatttttgtatttttagtagagacggggttttaccatgttggccaggctggtcttgaactcctgacctcgtgatccgcccgcctcggcctcccaaagtgctgggattacaggcgtgagccaccgcgcctggctgggagttgggtttgtaaatctccctgagtggggctggggcagggaactgctgggtctgggtcttcctggctcctctggtctgtggcttcctgactgcggtggccgggggctcccagggcatcgtggccgtctgtcttgctgagcgtggcacgtgcctttccatgctgtggaggagcgtctcccggtatggcgaactgctggttagggtggggcggtgttgccaggtcatccaggtctggcctctgctctcgacatcgccggcgctgttgctcatctgcgcttgtgatgttcgatgcctgctgcacatgtcttggcttccctctttcccggcctctgtgagctccagcgctgcgtcccttctcttcctcctgtagagccgcagagcacacaacattgacctgaaggggacagtcgtgatctttgacgaagctcacaacgtggtgagtctccgctggcctcctaaacacctcctattgcttctggcctttttgtcaagagccacgcaaacctttctggaggggctctggccaaactcctgaagccctaggtgcccaggactggggactgagcacaccaggagcttctgccaccccctcccgccctgatccgatgcctctgctggggctggagactggccagctgggccagggacctgcccgtcaggcgcagggcccccacaggccgctcaccagaccctttccctccagccagctcggggtcagcctgggccagggctgtctcctctgccctcggcagcagcaggcttgtggtcttgcctgcagtgtctctgcccttccggccacatggcttgagactgaggcaggagaatcgcttgaaccttggaggcagaggctgcagtgagccaggatcacaccactgcattccagcctgggtgacaaagcgggattctgtgtcaaaaaaaaaaatgttgactgggcgcgctagctcatgcctataatcccagcactttgggaggctgaggtgggcggatcacgaggtcaagagatcaagaccatcctggccaacatagtgaaacaccgtctctactaaaaatacaaaaaaattagctgggcgtggtggcgtgtgcctatagtcccagctactcaggaggctgaggcaggagaatcactcgaacccaggaggtagaggttgcaatgagccaagatcacaccactgtactccagcctggtgacagagcaagactccgtctcaaaaaaaataaaatcaaaaagaataattggcaattccagtgaaataattgtttgtttgtttgttgagacagggtctccttctgtcgtccaggctggagttcagtggtatgatcttggcccactgcaacctccacctcctgggctcaagccatcctcccacctcagcctcccgagtagccgggactacaggtgcacaccaccacgcccggctaatttttgtattttttgtagaggcggggtttcccagcgttgcccaggctggtcttgaacccctgagctcaagtgatctgcccaccttggcctcccaaagtgctgggattacaggtgtgagccaccgcgcccggcctgaaacaatcgtttctaaatattggtgtgggccacacagtcatgtttggacctacttgtggccttttacagaccccaggccaaggctttgggaacttggctgtcagcctcctgtgccttctgcacccccaccccatttctgctttctggaacccccgatcctgtcctgttctgtggtgattcgggtgtgcttgggctctaggagaagatgtgtgaagaatcggcatcctttgacctgactccccatgacctggcttcaggactggacgtcatagaccaggtgctggaggagcagaccaaggcagcgcagcagggtgagccccacccggagttcagcgcggactcccccagcccaggtgcgttcatagccagactgcttggtcctgaggcctgcgctgctgcagggtgagccccacccggagttcagcacggactcccccagcccaggtgcgttcatagccaggctgcttggtcctgaggcccgtgctactgcagtgggcagcctgccctgtggctgtgtgtggtcggcctgggcaccatctattcaggctggcactgcagggcatccgcttctctcagaggcttcttgggtgtgaattcttcagggtcctgtagcctgtggaagggctggtattgttcagtagttctggtattttccaaagacctatgtcttctcccagccagtatcaacttggcctctactgtgtaaaactggaaaactctactttgtgaagctgagttgggagcatcgcttgaggccaggagtttgagaccagcctgggcaacatggcggaacctcgcccctgccaaaaaattagccaggtgtggtggtgtgctcctgtggtccaagcttttccggaggccgaagtgggaggcgtgcttgagcctgggaggcagagcttccggtgccccagatgactccactgcactccagcctgggcggcagagtgaggccatctcaaaaaaaaaaaaaaggaaaactaaatatattcactgtaagggcattttgcatctttaaatgacccacaaatctggcatgcatcagctgctctgcctgtaggttccttcccagtgtttgtccagaggtgtatttccacacagcgctagtcacggcatacgtggaaaacgtggaaacccttcatggatgttgtcagttggtctatattttctttcttttttttttttttgagatggagtttcacttttgttgcccaggctggagtgcaatggcgcgatcttggctcactgcaacctccgcctcctgggttcaagcaattctcctgcctcagcctcccaagtagctgggatcacaggcgtgcaccaccacgcccagctaattttgtatttttagtagagatggtttctccgtgttggccaggctggtctcgaactcctgacctcacgtgatccacccgcttcggcctcccaaagtgctgggattacaggcgtgagccgccacgcccggcctttgtccatattttctacatggcttctgtaaacagctgactaggagtctgtgtgaatatcttcataggttctgctgtgacactacttgctcgtgagcatctccaggtgtaaacagcatcagcttcccccattttcctttaaaatcgcacatgtggacggacaccacggggaccctggaccctggggagccccgtcctcacccttctcaccaggatggctgcttggtagagagtgagtttgcaaagttggcatttgtttagtacagaagttatcaggtgttctggctttagaatccctttatatatatatatatatacatatatttaagtgacagggtctcactctgttgcccaggctggaatgtggtggtacaatcaaagttccctgtagcctcggcctcctgggctcatgggatcttcccgtctcagcgtcttaaagcgccgggaccacaggtgtgcaccactgccaccggctctcaagattgccacgcagggagttgcagtgggggaaggggttcctgggactttgaacgctccacctccctcctctccacagtcccccaaccccacctctctaacggggtggacggccgcctctttccatccttcgcttggcgcagggtggggagagtgacaggtctccttccctcatctcggcagctgccatttcatcgcttacataacgtgggagaaacatccacccacccccaggcctgtgtgaacatcaccacggggccttctccactcttcagttttgttagttacttgatgtgcagggctttttgttgtaactagtgggggacgtgtggtggggtgggcttctgccatctcattcaggaccagaacttcagttttcatccctatctgttcccccacccctttggagatggggtctcactctgtcacccaggctggagagcggtggtgccatcacggctcactgcagcctccacctcctgcagcctccacctcttgggctcaagtgatcctcctgcctcggcctcccaagctcctgggactacaggcgtgtgccactgtgcttggcagggtccattcttttcctcacactttatttattgaagagcccaggccgtttaccctgcagagtcggaatctgtacaggaggggcagccacacgagttccccggtttactctgaacttaggtggcttgagggccccagttagactgcggccaccgtttgccgggctccagatgggacgtcctttctatcagaaggctcacagtatctcctttcccgtttcttcccatgtgaacattgttgctgctgaacacctgaatatgttaatcactgggggcttgcaagatggcagtgtgctaattccatcatctagtcagttagcaggaataacttaggaccacgccctgcaccatatcagctatgtggtgatcccattcacacaggaaaggtgggacaaatgctgggggtgggccgggtgtgctgtctcacacctgtcatcccagcactttgggaggcccaggcaggcggatcacgaggtcagagattgagaccatcctggccaacacggtgaaaccccgtctctactaaaaatacaaaaaaattagccaggtgtggtggtgcatgcttgtaatcccagctacttgggaggctgaggcaggagaatcacttgaacccaggaggcggaggttgcagtgagccgagatcgcaccattgcactccagcctggcgacagagcgagactccgtctcaaaaatcaatcagtcaatcaagtgtcatcactgaatgtttgtgtgtgaacgtggggattggtcctgccccatgctccctcctgaatctcactcctgacctcagttgctgcaccttgaggtgttttcatgtgggctcttgtgtcctgaccccggcggttgtggcctctttgctgtctgggagtcaggatttttcacactcatgtcctgctccagacctggaatcagccaagtctccaagaagccctgctttcttttcctgcaagacggtatttcaagacccgccatgcggcagcgggttggtcatggttactgggttggtcgttgttactgggtgttttcgtggagatacagccatacgcacaggtgtgttcacaaatgttaattctaaaggtcaaacacccggccaggcataagggctcagcggtaatcccagcactttgggagaccaagactggtggatcacctgaggtcaggagtttaagaccagcctgagcaacagggtgaaaccccatctctactaaaaatgcgaaaattagccgggcatggtggcgcacacctatagtcccagctagtcgggagacagacacgagaattgcttgaacctgggacatggaggttgcagtgagcagagatggcgctgctgcacccctgcctgggtgacagagtgacaccctgtctcaaaaatgaatagataaataaagataaaacacctgctcctcttggtgtctccagtttggatttggcctgtgtagcctcttccttcgcctgttggtggatttggcctgcacggattctgtgtggcctcttccttcccctgttggtggatttggcctgcacggattctgtgtggcctcttccttcccctgttggtggatttggcctgcacggattctgtgtggcctcttccttcccctgttggtggatttggcctgcacggattctgtgtggcctcttccttcccctgttggtggatttggcctgcacggattctgtgtggcctcttccttcccctgttggtggatttggcctgcacggattctgtgtggcctcttccttcccatgttggtggatttggcctgcatggattctgtgtggcctcttcctttccatgttggtgtccttttttccatgccaggaatcctggttctcaagggcggggttgttggcacgagcgtgatgcagactgcctttgctgcctttctcttgcccagggctgaacatggagctggaagacattgcaaagctgaagagtaagtgttgccctccccgcctccttgcagctgggtggggcctcctccttgcgaggaggtgggtgacacctcctcgacccacagtgatcctgctgcgcctggagggggccatcgatgctgttgagctgcctggagacgacagcggtgtcaccaagccagggaggtgagaggcggggagccagccccttcactgcaggcccagcctagagctagaaacgggccatggtgcagtcctgggctgtcacatcacgagtgaggcctgttttcaggcctgttttccctttttgagacctgggaggagcacctgctttgcatgatctggttgctgagatgttgagaggagcagcacacactcccacgggacagcacacagccccccacggaacggcacacacacccatggaacagcacacacactcccacgaacagcacacacactcccacgaacagcacacacactcccacggaacagcacacacacccacggaacggcacacacacccacggaacagcacacacactcccacggaacagcacacacacccacggaacggcacacactcccacggaacggcacactctcccacggaacagcacactctcccacggaacagcacacacactcccacggaacagcacacacacccacggaacggcacacactcccacggaacagcagactctcccacggaacagcacacacactcccacagacagcacacacacacccacggaacagcacactctcccacgcggggccgctgggtttcctgcagtttctcctcctccaggcctttccctggaccctggtccagtccgtcatttgagcacaggtgcctgttagaacgagaccttcttgttaggacgatgagtgtcccagccaccacctcttttggactccgggaggcctggaacgttctgaacgctccgtggggctccagtcttctccgcagccagggcagcagggtttgctgtctgtcctgcaggcagatgaggagtcagggctggggcctgtgtgggggctctcctgagcgcacagccgccgaggtggagcgtgttctgcctgagcgccgacctggtcgggggaatcccagttgcttccaggtggagccactgtcctcagcgtaatgctcaaggctctggcctggctcctcggccaccctgcaccctcagggtcccctcctgtagcttctgctgccccatcactgtcactctccaaagctttggggactctgcccagagccaccgcctcccagaagcccctgacaacctcttgacgaccccctagtgaccccatccctcccctctgacggcggcccctgctctgaggcggcttcttttcctcggtgctgttctcgtgctggccaggcctcctctccccacctggaggctcctgagggcggaggcctctcacctccaatgctggcgtcccctggagggctgaatttgtttccgagggaaggaaacttccacagttgttgccttcagttccaaagctgcagcctgatttccccctccaggctcgagcctgttttcttctcggcagctacatctttgaccagtgtcgtcccccctcaggcccgagcctgccttcttctcctcagttcccaaagctgcagtctggtccccccgccaggctcgagcctgccttcttctcctcggcagctacatctttgagctgtttgctgaagcccagatcacgtttcagaccaagggctgcatcctggactcgctggaccagatcatccagcacctggcaggacgtgagtgctggcacggggtctttggtgcgggcaaatgtggcgtagggggtgcagcaggcctccatcttggcagtcagggctcccctggccgtcacctggccgtcagcaggaacaggcccacagaacctcatcttctgatcggggcgtggaggcgttagtgccacttgccagctgccgtagagcctgtcccagttctgcagctggcggcttcgtcctacagcctcatcccattattctgcttttgagaaagagcagcccaaggccctagctggcttgtggggcctctggcttctccacaccaccccgagttctgcttctcagagttgtggggtccagaggctttgcccagaggcggtgtccccatgggctgctctggtttgagacgccgggcccagcggggtctctcctctgctgcgctcccgggtgctggggagggtggcttttgctgcttcaacccttaggcgaccatagagcctcttttcaagtcccactgacccccttggagactctgtccctgcctggcttctctcctggctgctgggaagagcaggcgaactgcccgccctgaatggatgctgcgctccaccctgggccccccattgggcaggagatggagcttggcagtcgggctgagcgggctcatgctggaagggccggggctggggtcggggcctcccctgcctgcagtgtgggtgtcagcgccctgctgccctccaggtgctggagtgttcaccaacacggccggactgcagaagctggcggacattatccaggtggggcctgctcctctgtggcatctccttccctgatggaagccgggcgggtgccttctcctgctgtattagttaactgattctagacttggggatgggagaaaggcccctacaccacctgtttctgattggcaaactctcggctcctttccagtgccctaaacccacactgggcctcctgcagggatgggggaggacgaggtctggtggcacatgcccagggtgatgctggtgagggaggacgcaaaggacagtgggggccggggagccgctcctgccctgtccgggccctcaggccaggggggacccactgctggcagccccagcagccccagctgcacgcagatgaagagctctggacacacgcggcttcctgaacagcttctccagggacagacaaatggggaccctgcaggttcccggcaggggtgtccctgggagcccatgattgggggtgcgaccctggcccccttctcattggccccgtcctgtcctgcaatgcccgtcccatgtgaggtctgcttctggctccatgcctatggcagcacctgctttccctggcgtagaggtgcttgtccggtttgtggagggcacgccccattttgggtgctctgggcacgttgcctctccggggcctcggtggcttttttagaagcagactcagaagtccctgactggggaagccaaggcacaggtggctgtgtggagccctgtgaggcctcctctgtgctgcccacgctgtacctgctggccacacgagatcatggcagggttaggcagggctgcccagcgctatgacagcttcatgagtgtccatctggcctgtggggtgcttgagctgggggaggccgcagaagaaccctgggatgcatggctggcctgtgcatgctgctgggcatggagctgcagatcccggaacaagcaggcactgccttctccttcacagacgcagctctgagcgggggcgagacctgggcagggaccaggtggggtgggcacagggtggtggggcccaggctcagccctccctccactgtggccgtctctgtggccagtgacgccacagcctgtgtcttctctgtgcggtagctggggctggaaggacagcactgccttgtcctcccaactcctccccaaaggcacggtgggcatcccaggcccagacccctctgtctgtggctcctgcctgccaagggctgctgtgctgtcccgcatggagtgtggttggctcttcaagcaggaggccgtgcacctatcaggcggacctgcttccatgtccctgatgggtcactgcaaagcacctccagcacatggccaggcgaggtagccctgcagcccagggcctggagggcaggtgtgagctggcccgggcctgtccctccctggaatacagcttcccaggctcccacttatggagaagtctcctccacactatggaactgaatcctagaatgtggcttctgaggttcctacactcgaactgaatcctggaatgcggcttccaaggcttccagctatggagaagactccacactctggaaccgaatcctggaacgcggcctcccaggcccccagctatggagaagactccacactctggaaccgaatcctggaacgcggcctcccaggcccccagctatggagaagactccacactctggaaccggatcctggaacgcggcctcccagcctcccacttaaggagaagtctccacactctggaaccggatcctggaacgtggcctcccaggcccccacttaaggagaagactccacactctggaaccgaatcctgcacactccatcggtttggaatttcctttggctgctgctctaagtagccgctggtggatgactcagcttctgccagccctcgggtgcctggaggatgagggactgcacacagtgctcacccgcgttggctcctgagcccctgcaggtgtgggcggtgcccatagggctggtgctgggttgggcctgcagccctgagtcacaggtgaccctgggggcagagtggggccagtggccccaggaagaggatgtgggatgcacagctcagctggaggcgaactccaggcagggtcaggccgtgtgctcggaagtcagggcttagctggaggcaaactctgggcagtgctggcccgtgttggggaaccagttgcccctgggcccccgtgagactgctgggtcctcatccctctctgcctgaggccggagctgccctgggctgaggcacagggggatttgtggtggtgtttttttgagaaagggtctcgctttgtcaccccggctggagtgcaggggcttgatcacagctcactgcagcctcaacctcctgggcccaagtgatcctcttgcctcagccacccgaggagctgtgaacacaggtgtgcaccaccgcactcagctaatttttaaaatttttttgtagagatgaggtcttgccatgtttcccaggctggtctcaaactcctgggctcaggcagtctgcccgccttggcctcccaaagtgctgggattacaggcaagagcttccatgcctgcccagcagaaggcttttcgaaggaagctgtttcctgaggcagactcagccctgctcatggcagccaccagcgtgggggtgaacttgttctgttacttccatccccgtgggccaaatgctttggtaaaacacaaggccctgtgtttagctgtcttgacagtgaaaatggctgggaaggaaggaaggaacggaaggaaatttctctctccttctgtgcgtacccaggcacgtgcacatgcatgcagagtacgcacacacgcacgcacgcctgcacaaatccacgcatgttgccaagtctctgtgttccagccgtggtgtctgccccccggtgttctctagttcggcttctccgcatttctgtgaatgattccggcttcttggtgttcccagcagaactccctcaagtctgcggcggggctctgacggcggtggcttggctgacatggccacattgctgagcctgttgggggctttgcgttcctgttctggccgtttttggctcgttttccaggaacggtcgtcacgcgctcctctcctagtgcaggcatcattcctttcccattgatttgcagggttctctgtaagttctgaggatcccatatacatatactctctgtaagttctgaggatcccatatacatattctctctctaagttctgaggatcccatatacatattctctctctaagttctgaggatcccatgccgacatacatattctttccttgtctcatgctggtcattttttccattttcatgacaggtttggtgaacacatgtttccttgtcagatttttgttctgagcttgtgcctcccgaccaagatgctaaaccgggtcttgtgtattctccaaactgcactgtagagtgacggagctttgtgtctgggcctccatgccttctgacgtcacctgtgggggtgtgaaaggcagactctaccttgatttttcccagcacgccacaccggtggttctgtgcgctgaccgagcggctcggcttcccccaactccactgggcacctgccacacttttcctcatgtttttgttcactgtggttttgtcgtaagtcctggtgttggcctgaaccaatttctttttgtttgtttttgagacagagttttgctcttgttgcccaggctggagtgcagtggcgcgatctcggctcactgcaagctccgcctcccgggttcacgccattctcctgcctcagcctcccaaatacctgggattataggcacctgccaccacgcctggctaattttttgtatttttagtagagacgaggtttcaccgtgttagccaggatggtctcgatctcctgacctcgtgatccgcctcccaaagtgctgggattacaggcatgagccaccgtgcccagcctgatatttttagtagaaatggggttttgccatgttggccaggctggtctcgaactcctgacctcaggtgatcctctcaccttggcctcccagagtgctgggattacgggtgtgagccaccacgcccggcctcttgttcttttgaaacctgccctgacgttttttccatagtgcatcttggagtcagcgtgtctacttcctgtaaaaatcttactgtgattttgactagaatgtgttgaattcctgttttttttttgagtcagggtctctctgttgcccaggctggagtgcagtgggaccatcacagctcactgcagcctcaacctcctgggctcaggggatcctctcagctcaacctcccaagtagctgggaccacaggcacatgccaccatgcccggctaggtttttttttttttttttttggtgaacaccctggggttgcaccatgttgcccaggctggtctcgaactcctgggttcgggcagtttgctcctctcagcctcccggagtgctgggattacaggcctgagccactgcactaggccatgttgaatttctagattaatttggggccctcaggggcacagagaggagggctgggccagttggcgggaggagaggcccctcgggctgccgcattttcagtgcatggagatggcctatgttgggggaacacagagctcaccgggggtccctgcagggaggagaaagggtcaggcaggtgccagctcctgtccattggcctggggctgcatgatggcaggggccggtgaaccgatgacccctgggtgtcctgtgaccttctgtgtatgcggctgatgctgcagaaagtcgggtggcctcaggctcctgacggggctgcacttcctctgcctttcagattgtgttcagtgtggacccctccgagggcagccctggttccccagcagggctgggggccttacagtcctataaggtaggggccacctccaggaggcaggtggagggcagcccttgttccccggcagggctgggggccttacagtcctataaggtgggggccacctccaggaggcaggtggggctgggggtcttctggtcctaaaaggtaaggggctgcccccaggacatgggcggggcctccacactcctggtcctgtcccctccaggtgcacatccatcctgatgctggtcaccggaggacggctcagcggtctgatgcctggagcaccactgcagccagaaagcgaggtacagacctgggcccacacgctccccgcccgcccgggtgcagtgcccggcaccaccatgccacaggctaggcacatgcccagccgtggatctcctgcccccatgggcctggccaccttctccatatccaggccaatccagagcattctcctcactgtccctctgaagattggagttactgagagacgtaggagatggcctgatggcaccgtgacctgcccagagtcacctggttggtggtggcagagccacagcccagccaggcctccctgctgggacacgctcgtttatgccgaggccgtcagcacagagcctccacagtgaggcacggctctgcctgctgcctccacgcagcgcctggccgggccaagcctcagggtcacatctgaagggggcccggctggccctgttgtccgaagcccctggtgcgctcagccccgaggccccacgtgccttcttggcttcctgtgctccgtggcgtcttcgagtcggtgctgccggggacgctgtgtggatggggtctgtgagtgtgccctcggctccgtgtccggagccctgtggttcttggggtgtatctggccccacccccactgcgtggtgtccagggtggggcttcacggctgcagctgcgggagctgctgcccctgccttgtgctccagtggggccttgcctctgggcttggttcgtccctctctggaacattctttctcagctgctgtccgacccatggtggcatgacgtggccctggctgaagcagcccttgtgcggttgctgtggttgggtctgcctggccgagccggaagggaagggctgggagggcgtcagggtggcgtggcttgacccccgctcggtgatggtcctgcagcaaggcctctcccagcaggaagcgtccatcccggggggaggccggcgcccctcacgcagttggggttgcgggaggcagtgcgtgcctgaggcagccggtgcacagattccaagggcctggaatctgtttgttccattgacctctgatgtcacttgacttctcagaagcagccactccctgcactgggcgtttgtaggaaatgagctcctggaggagggggtggggaagttcccccattgcagggcacactcagccccaggaaggaaacgtgcctcgtccctgctgactccgaatcgcagtcagagtcgttctgcttgtgccgtgttgaattcccggcatccggcatccagactcagcctcctccccaggccacggccgccgtggccagtcggtcaagcccttctaggaacttcctttgagctggcgcccttgttcactgctgacgccactcagaggcttgtgcacgtgtcctgcttccaggcagagctgggaactcgcaccccgtcttctgcacgcggccgtggaatgtcgggatgccggcgcttccttcccgtgtgctcttggcggggtgggcttcttgccctgagccgcatgtcacagtttctgcagaagtttagggttggagtgggctgacctctctgcaggtgtccccagcctctgcctggggtctgcctcctactcccaggaccccctgtcccccagaggggccccaagctggcaggctcacactcagggcagcctcctttgttctgacttctgcacagtgggcctgggtggctgcccgcggctcgcttgcttgatgccagtgggtggagagggtgatgggcagagaggcaggtggtcaggcccccagtcccgtcctcacactctgtgccctctgccgccccccgccccacagggaaggtgctgagctactggtgcttcagtcccggccacagcatgcacgagctggtccgccagggcgtccgctccctcatccttaccagcggcacgctggccccggtgtcctcctttgctctggagatgcagatgtacgggccacccctgccagggcctgagcaccggtgacacctctgacatcagcggggtggaagtggtgggggtccccatgagccgggtgctgggggtctcgggcctcgagggctaaaggggtgctggtgcacttccccactgtctgctccctctggccacgctcagccctttcccagtctgcctggagaacccacacatcatcgacaagcaccagatctgggtgggggtcgtccccagaggccccgatggagcccagttgagctccgcgtttgacagacggtgagggcctgtccctgggccctgctggggtgggaggtgggggagcactgaggcctgaggtcctgagcagtggcctctccggctctaggttttccgaggagtgcttatcctccctggggaaggctctgggtgagtgccctgaatgccccagctgtgcccatcctggatcctggacccctgctcccaagagctggtagggaaccctgcagacatcctgcccctgccttgaccccggcccctgcacttccaggcaacatcgcccgcgtggtgccctatgggctcctgatcttcttcccttcctatcctgtcatggagaagagcctggagttctggcgggtgcgtctcccctgtgttctgggcggggtgggtgagggcagggctggagcatgaagcaggcagtggtcacagctcctgcttgccctcatcggatcggcggcgtgaccagggctgccgtgtccctgcctcttcctcccacaggcccgcgacttggccaggaagatggaggcgctgaagccgctgtttgtggagcccaggagcaaaggcagcttctccgaggtcggcacttggccggggctctgggcctgctgccccctcgtgcctcccctgcctctcacagcttccccaaggctgaccactggccctgaccatgggctccggcggctcccgctgcctcttcagggctcctgcgtttccttcctggccctgagtgttgcctcttatcttacaaagcccccagcaccgggtgggtgtggtaacagtggccctcctgtctgagtagccctagtcggccaccctggccctggggttccccgtgttttctgggaagcactgagcaggcgtggggtcagcctgggatccgtgccaggaagaagcttccagaacccgattggccttcctggctaggacgatccttcatcttggagcatgagacctgggtctccctcatgggggaggaaggggctgggggggggctccaggctcagcctcaccaactttccttccagaccatcagtgcttactatgcaagggttgccgcccctgggtccaccggcgccaccttcctggcggtctgccggggcaaggtgagctctccagggccctctgccctgacctggttgcctgttccctggtgggtgcttatggctccccagcagactctgggccctgggggctgcccggtcccctccttgggtcccacgagagcgactgctggccctgctgggagcgtgtcctgctctgggcctgggcaggcaggatgggagtttcctggccacaagagttggaggtggcgtctgggagctgtggaccccaagtggggtcctgacccacagatggagcttcctcccacccctggttggggacggagcctcggggaaggtggctgggctgggtgtgggcaccagggagaggagcccccacggccccaggcagctccctggtgtgtcccctaggccagcgaggggctggacttctcagacacgaatggccgtggtgtgattgtcacgggcctcccgtaccccccacgcatggacccccgggttgtcctcaagatgcagttcctggatgagatgaagggccagggtggggctgggggccaggtgagttacagcagggtggggctggggtaaggcggtctggtgactgagcccccgccccgtggccaagggagcccccgtgaccgagccgcctcgccccacagttcctctctgggcaggagtggtaccggcagcaggcgtccagggctgtgaaccaggccatcgggcgagtgatccggcaccgccaggactacggagctgtcttcctctgtgaccacaggtgcgtgcagtccggtggcaggcgcggcgccaggggacacgcccacaccccactgggcccctggactctccttccccacatgaggccccgtctcctccagagcctctccggctactcggggtcagcgtggggcccctgcagcagatgagggtcttcacttcggtgaactgaacccttgaagcggctgtgggcagggcagcagggctatggccaccccccaggttcgcctttgccgacgcaagagcccaactgccctcctgggtgcgtccccacgtcagggtgtatgacaactttggccatgtcatccgagacgtggcccagttcttccgtgttgccgagcgaactgtgagttcctgcccagggaggggatgagggtgttgtccccagaggagccagaaatgggtccacccacccccatggttctgcagatgccagcgccggccccccgggctacagcacccagtgtgcgtggagaagatgctgtcagcgaggccaagtcgcctggccccttcttctccaccaggaaagctaagagtctggacctgcatgtccccagcctgaagcagaggtcctcaggtgcggacgggcagcgctgggtgggcggtgtgggggtggcggagcgggcggcgtggggcgggcagcaccaggcgcccagggcggaggcgactcacctggctttgtgcgcttcccctcccacctccaaaggctgcctctccctcctagggcagggcccccacgggctgcaaccctcccctacaggcagagaacgccccaggcaaggatgccccccgaggctgagactccccccaatagcagggaggacacccacaggcaggaccccaagtgctgggactctcccccaagaggggctttgccacaggcagggaccccagctggggccccccgtgggcttcactgcgcactcgggtgcccctgcagggtcaccagctgccggggaccccgagagtagcctgtgtgtggagtatgagcaggagccagttcctgcccggcagaggcccagggggctgctggccgccctggagcacagcgaacagcgggcggggagccctggcgaggagcaggtacagttccagggccttgggatggacacagaccctctgtctcctgaggccaacccgaccccgcccatctggcctcaggcacctccccacacacccctgtaaatcccctgcctggcaggcaggcgggcaagcgggcgggggatcccagctgcctggctgtctgtgggtcctccaccccacctcacccacaggctgctggctcccaggtggtgcatgccctggccctccgcgggtgccccccacatcactttggttctctggcgggtcagcttggctcagtgcactcaaggtcgggtgcccctgccactggctgcgcttgaggctggcctttctccaggaatgtgctgcgggtggaacccaggttccttcttccttggggccttttgccccagaagcccataattcctcaggccaacccgaaattttctccctgcttcctgctgggagccattcccctcttcctgcccatccctgcccttcaggcccctggagtgagctccaggtgcaggcaccaggcacctgtgtccccttcctgccagcccctcgctgtggtcggactgtcttccctggacctgctcttacaagtcaccacctgcgagcctcatgagccgctggtgtgacttggacaggaccaagttgtggcactgtcaccggggtgtgctgtgcccccctcccccgacctccatcttggctcagggctccttgggaccatcttccctgtgcgtccaggtgctttgggaccccagagtgtgtggttggggtctgtgtgtggttgtgagctgtgtcctcctcaggcccacagctgctccaccctgtccctcctgtctgagaagaggccggcagaagaaccgcgaggagggaggaagaagatccggctggtcagccacccggtgcgtgagctgtccctgcacctgtgccgaccaccatagacacgcatgggaacgcagccgtgggtgcccccagccacggctggtcccgatgggaccagggaatccacccccaggagctgatgtccagggcagctgtgatgctgacggccaggggctcaagtgtgtggtttcttctgcagggggctcatgagtcccagctggaatcaggccccacccttgggcaggtttggcatggggcctgcagcactgggcttggccctggcatttccctcaagtgtggatgcacacctgcctcatgtgagggacacagcccattcctagccttggatcaaagaacggagttatagccggagccaggaagccccctgcctgctggaaaaccccaagtgtggcggcctttgtccatgtcccttggcttctgggaagaactgggtggtgcccaggcagggctggtgccatcaggaagtgggtggctgctgaggggcctgggctggcgagggcctgggtggggagtgcctgggccgcccctgccttggtttccacgtttccgtgttggtctggggtgtgtagagagatgggcactgctcatccggaagcccctccttgtgcgctgccatcctgggagcctcagccgcatccgctgtggggcagggggcttgagggaggaggagagagacgggccatgcaggacccctggcttgaggcagagccaatctaccctttgcccattcactgctctcagttccctgccagcctctcactgtgtgacctcagacgggcccagccccacagctttcttcccgcagcccctccctatgtccatccagccagccagtttctcaggcagcagccccacctcggcagtcactgtcccagggaacgctcaatgttccaaggaaggctctgcagccccagggaccagatgatgaggctggccctgatggagcctcgggcctgtgtcctgcaggaggagcccgtggctggtgcacagacggacagggccaagctcttcatggtggccgtgaagcaggagttgagccaagccaactttgccaccttcacccaggccctgcaggactacaagggttccgatgacttcgccgccctggccgcctgtctcggccccctctttgctgaggaccccaagaagcacaacctgctccaaggtgccctggcttgcagaggccacccaccctgagggcagtgctgccgccgcgtgtggggtgggggccatctgggtccaaggtggtctctgttctctagagaaaaaggggcagatggggacagacgccccttcctctacaggcttctaccagtttgtgcggccccaccataagcagcagtttgaggaggtctgtatccagctgacaggacgaggctgtggctatcggcctgagcacagcattccccgaaggcagcgggcacagccggtcctggaccccactggtaaatggggccccaggtgggaccctcagactcctgcgtggaaggcagtgtgggccagagtcctgggctgcttggggtgggcatcctcgggccctgcttggccccgcctctctgttcccctatgggagtgatgggggcctccacctccaccaccagcaccagcagcaccacctccacctccacctccacctccacctccaccaccacctccacctccaccaccacctcctccaccaccaccacctccaccaccaccaccaccaccaccacctccacctccaccacctccacctccaccaccaccacctccacctccaccaccaccacctccacctccaccaccacctccaccaccaccacctccacctccaccaccacctccaccaccaccaccaccaccaccaccaccaccaccaccacctccaccaccaccacctgcaccaccacctccacctccaccaccaccaccacctccacctccaccagcagcagcatcacttgttggggagaccctgtgcaactccatgcacagccctgtccctgccatagccccgacccctaagcacagccctgtccaactgccacacgtcccctgcctcccatgcatggtcctggggggtcaactgcacacgccagggtcctagggtcctagacccctgtcctccctgtttctgcctctgtttggggtggagtccaagtctccagaggcggaagcatctgtgttcgtgtgttaatgaacagcccctacagagttcccctagttcacccaggggggaacctagcctgttgggacgaccccagatcccttctgggcttggtactcactgggatatcctcatgcctgcacccagcctacggctctgagctcctgagtggggctttggcctgcccgccactgttccagcccccatccagcaggctggtgtctcctctgatgcccccagcacccaggcgtgtacctgcctgggttttcccgccctggtctgaggtgggtgaggcctggcctccctagccagccctgcccccccaccccagggaactttccagatgctctcgaccagctttgtggctctacatctcttcatcaggaagaacggcgccggatcccaagctgaccgtgtccacggctgcagcccagcagctggacccccaagagcacctgaaccagggcaggccccacctgtcgcccaggccacccccaacaggtagctgactcctgaaccgtgtgcagcctacgacttggtgggtccctcagtggcttcacgaggctaactcttgagtgtggccggggctgcccctgtggggagccatctcatggtggggactgctcccggttctgcaccccgcagttgtcctgagcagctctccaggagttcctggaggaagggcgggcagggcggtgggactctcagtcctccaccccagcgccactctgagccatgctactcccacaccaggagaccctggcagccaaccacagtgggggtctggagtgcccagagcagggaagcagggccagcacgccgtgagcgcctacctggctgatgcccgcagggccctggggtccgcgggctgtagccaactcttggcagcgctgacagcctataagcaagacgacgacctcgacaaggtgctggctgtgttggccgccctgaccactgcaaagccagaggacttccccctgctgcacagcaagtggccctggcgtggggaacagccggtggggtggggggcaggggacaaaatgggggctgtgccgggtctgattgaagctccccgcagggttcagcatgtttgtgcgtccacaccacaagcagcgcttctcacagacgtgcacagacctgaccggccggccctacccgggcatggagccaccgggaccccaggaggagaggcttgccgtgcctcctgtgcttacccacagggctccccaaccaggtagggcacctgcctggctgctcctggcagcgccccaaccgcacgcagccctgggagtgagcagcaaagccccaggcccccctcagactcaagtctctgtctccaggcccctcacggtccgagaagaccgggaagacccagagcaagatctcgtccttccttagacagaggccagcagggactgtgggggcgggcggtgaggatgcaggtcccagccagtcctcaggacctccccacgggcctgcagcatctgagtggggtgagcctcatgggagagacatcgctgggcagcaggccacgggagctccgggcgggcccctctcagcaggctgtgtgtgccagggctgtggggcagaggacgtggtgcccttccagtgccctgcctgtgacttccagcgctgccaagcctgctggcaacggcaccttcaggttggtgcctggccactacagttcctgctgggtgtagccccaggtgatgggctgagggggaaagggcaggcccttgtcctggtggcaacgcctggcagacgtgtgcagtgggccggttgtctcacaggcctctaggatgtgcccagcctgccacaccgcctccaggaagcagagcgtcatgcaggtcttctggccagagccccagtgagtgcccacggaggcccccagcacacccaacgtggcttgatcacctgcctgtccagctctggtgggccaagaacccacccaacagaataggccagcccatgccagccggcttggcccgctgcaggcctcaggcaggcggggcccatggttggtccctgcggtgggaccggatctgggcctgcctctgagaagccctgagctaccttggggtctggggtgggtttctgggaaagtgcttccccagaacttccctggctcctggcctgtgagtggtgccacaggggcaccccagctgagcccctcaccgggaaggaggagacccccgtgggcacgtgtccacttttaatcaggggacagggctctctaataaagctgctggcagtgcccaggacggtgtcttcgtggcctgggcttggtggtgggagttgagggacagggagttggcagaggcccctcccagcctgccatgtgacactgtacttcctccacggtgggctcagccctgccctcatcctcacagccgcagccaagctgcagttggtaggggatccaccgacacaccaggctgcctgggctggtctctgggttgggagctgccccaggtgctgaggagggcagctccctggctggtgaggcccctcccagaaccacccttggactgagctctggggagggatggtaccaggtgggtgaggggggctgcctggggagggaggggttcctatggggcgtggcgaggctggcccagccctctccccgcccatatatgtagggcagcagcaggatgggcttctggacttgggcggcccctccgcaggcggaccgggggcaaaggaggtggcatgtcggtcaggcacagcagggtcctgtgtccgcgctgagccgcgctctccctgctccagcaaggaccatgagggcgctggaggggccaggcctgtcgctgctgtgcctggtgttggcgctgcctgccctgctgccggtgccggctgtacgcggagtggcagaaacacccacctacccctggcgggacgcagagacaggggagcggctggtgtgcgcccagtgccccccaggcacctttgtgcagcggccgtgccgccgagacagccccacgacgtgtggcccgtgtccaccgcgccactacacgcagttctggaactacctagagcgctgccgctactgcaacgtcctctgcggggagcgtgaggaggaggcacgggcttgccacgccacccacaaccgtgcctgccgctgccgcaccggcttcttcgcgcacgctggtttctgcttggagcacgcatcgtgtccacctggtgccggcgtgattgccccgggtgagagctgggcgaggggaggggcccccaggagtggtggccggaggtgtggcaggggtcaggttgctggtcccagccttgcaccctgagctaggacaccagttcccctgaccctgttcttccctcctggctgcaggcacccccagccagaacacgcagtgccagccgtgccccccaggcaccttctcagccagcagctccagctcagagcagtgccagccccaccgcaactgcacggccctgggcctggccctcaatgtgccaggctcttcctcccatgacaccctgtgcaccagctgcactggcttccccctcagcaccagggtaccaggtgagccagaggcctgagggggcagcacactgcaggccaggcccacttgtgccctcactcctgcccctgcacgtgcatctagcctgaggcatgccagctggctctgggaaggggccacagtggatttgaggggtcaggggtccctccactagatccccaccaagtctgccctctcaggggtggctgagaatttggatctgagccagggcacagcctcccctggggagctctgggaaagtgggcagcaatctcctaactgcccgaggggaaggtggctggctcctctgacacggggaaaccgaggcctgatggtaactctcctaactgcctgagaggaaggtggctgcctcctctgacatggggaaaccgaggcccaatgttaaccactgttgagaagtcacagggggaagtgacccccttaacatcaagtcaggtccggtccatctgcaggtcccaactcgccccttccgatggcccaggagccccaagcccttgcctgggcccccttgcctcttgcagccaaggtccgagtggccgctcctgccccctaggcctttgctccagctctctgaccgaaggctcctgccccttctccagtccccatcgttgcactgccctctccagcacggctcactgcacagggatttctctctcctgcaaaccccccgagtggggcccagaaagcagggtacctggcagcccccgccagtgtgtgtgggtgaaatgatcggaccgctgcctccccaccccactgcaggagctgaggagtgtgagcgtgccgtcatcgactttgtggctttccaggacatctccatcaagaggctgcagcggctgctgcaggccctcgaggccccggagggctggggtccgacaccaagggcgggccgcgcggccttgcagctgaagctgcgtcggcggctcacggagctcctgggggcgcaggacggggcgctgctggtgcggctgctgcaggcgctgcgcgtggccaggatgcccgggctggagcggagcgtccgtgagcgcttcctccctgtgcactgatcctggccccctcttatttattctacatccttggcaccccacttgcactgaaagaggcttttttttaaatagaagaaatgaggtttcttaaagcttatttttataaagctttttcataaaactggttgtagttgcacagctactgggagggcagccggggacacctgagccgcccgctgtgcccagatccctcaggctgcctgccatcagaactgctgcccggggcttcccctacctcagacagaccctccctgggaggatcagtggggagtgccacctctgcccccagtggctgtggcacgtggcaggggcccctgaagctcagcgagggtcagggcctgggagggtatcattgctggaagaacaggatggggctcaggccagccctagtcgccggggcccacactaaccccccacttatgaattcctcccactcccaactcacaggggatttcccgagaggggacctgccaaagacctcctccaggcctcccatgctttccgggaagtgaagcttctccctctctggggcaggctctgaagcctcccgatgcacccagagcaaccggggggctgcaccagccactcgcctccccagcacggccaggttcccggggctggaggtcccccccaggtcctgggaaccaacctgcagaacacacacagggtcccctggagaggacgcggggacttccagggcccgactcctgtgagtcacagccccgcagctgctgcgccacccccaccctgactcatgccccttcccagcagctcctcccaggaccccatgtccttcccacatccgcaggaagggagtgcctggactctccaggcccacctggggagcccctcacctgcccaccagcccctgagcagcccagtaacaccatcaccgtgtccaacagccaggagcctccaccctccaggagggaagggatggacagagccacactcgccgtctttattttgcactcaccctgggtgacactgggcaggccgctcctgcccacagccagactgaggaagaacacagcactcggcaggcccagtggggtccgtgcagggaggaccccaggaccagccttactcccgagcaggggacacagggccccacagagaacccctccgggaggttctctcctggctgggggagggctctggacccccacaaacactccccaacttgcggggctggggcataaaaacagccactcccagcaggccccctcagctttttgcatcagtcagctccctcccgggggattagggtgaggtgaagccaggcccaggcgtggggtataggtcttcccccgcaggcctcagccctgtcccgaggctgcatcacaatccagggcccccgctggcctttgggaacatggcctgggtcttcctcaaggcaagatcagccccagaccacttcggggtcacggggtcacggggtcacagggcagaagccagatggcagccatggctgacgggcctcctcctcgatggggcggagacagccacggggtctcccgagggtcccacagggctgtcctcatgcagcccaagccagcctgagcactggagccccaattcccaaccaggtctccctcagaccccccagaaagggcctcgaaaggccgccgctgc

SEQ ID NO: 527 - DNA, 81309 bp, Homo sapiens
  source 1..81309: mol_type = genomic DNA
taatttatttttttgtttgagacagagtcccactctgttgcccagggtggagtgcagtggcgtgatctcggctcactgcaacctccgccacccgggttcaagcaattctcctgtctcaacctcgcgagtagctgggattacaggcgcccgccatcatgcccaactagcttttgtatttttagtagagacaaggtttcaccatgttggccaggatggtcccaatctcttgacctcgtgatccgcccgcctcggcctcccaaagtgctgggattacaggcgtgagccactgtgtgcggctcactatcataatttttataactgtcattttgatggttgcatcaatttttttattttccattaactttttactttcataaattatgctgcagtaaacatctttaaacaatattctgtgattctttgtactctcagctctggcatggtgtctggaacacggaggcatctatagatgtttgggattgacggatgattgaatgaataaataaatgctgggctgccattgtgaatcaatggtccttgttttcctcttcaacagtctttccaattttggaatatgatcatctaaaatctaagttaaatgttgagaacagaagtttgggaacttactggaaatcaagctttggcttcctgtgaactacaccagtttgtaacaatgaacaaaagggccttagaacaaagtgaaggttttgtactgtaagctattttcctatctctagttgaaaaacatttgaacattttatcaacttcagcagtctttcacatggctttttcattctcctctcagtttaatttgtaaatatgaagatttttaaatatgtagggtgtgtttacagcatataaatatcatcttatctcctggtttagtccctggcaaggaaagagctggcagtttaataataaagtgactgaaggacatttgggatgtgtgtcctctgatgatgactgctggacaaacacaacaggagcagttgcagacaaagtagctgagggagaagacaggagatgaggacacgctcactactgcagagacttggtgagcactaagaggggaggtagaggtggtcacaatcccgcccctcatgccacagtgtgctggtgctttttttgttttgttttgtttttttgagacagggtctcgctcttcatccaggatggagtgcaatggagcaagcttggctcactgcagccctcgccttccaggttcaagtgattctcatgattcagcctcccgagtagctgggattacaagcacatgccaccatgcctggctaatttttatatttttgtagagatgaggttttgtgatgttagccaggctggtcttgaattcctgacctcaggtgatccccctgccttggtctctcaaagtactggatgacactcgtgagccaccgcgcccggctcctcatcccacaaggtgcttctaatcattgttccactgaggcgcagggaggaaaataatgtatgatcaagaacacctgaatttgtgtgctagtggcagaaaagtaatgagagatttattttagaggaaaacatccacagaacttgatgacagggagtaggaatgagacgatgcgtgatgagctcagtgtgccacttacagaggaagttgaagacaattaattttcaaacctgggtgactaatggttaggtttttggaaatacggaatttatgctggttttagacacactggttggagatgacaaggggacatttaaggggaaatgttgagagagttgcagcgtagagctggagctccagtgggccaggagcagaagagaaagatgctagctgctcacagaagtgggaactgaagcatctaaggcaagtcagatgttgcggagaggaagacacctcattttaagtgacagttacaccatgcaccagaaacccagagaagtgaagtggttcgctcgaggtctcatggcaagttagagacacagccactccacctcactttccttgatgtgtgtggtccagtttgctttacattataacacagaaaccttctcaatgttcagatatacctgctttacagtggacacatgccatttcttgacagtcaaggcaggctgacgaaagacagaattttatttccttagtttattaaagatgacaatgaactgccaggctgcacaagcaccacagcaggtggaaacgcagttcagagcacgggcggcacacacggaacatctctactaagactcgcactccttttatgttagttcaacgaaagctctaaatccttggcagagaacgtcaaaaacagcctcatttaagtggaaaatatttgtcttccactcttctgctatgtcttgaatcttgtctccacctggtaagcaaactatgttttttttctttccctttacttacagaaagaacactatcacctgccttcatttagaaggaattctcttcagtgcattcaaagcttctccccgcaacagcaggggattttcagatagtggtaacttgcaaagtgcttccaaaacatcccatcctctacccacttcccccctcttgaataaataactgggtatttggaaggtgaggacggcatcgtgtcagagtcactaaaacagacgcacgatctaaagggatggggtgcggttgagggagctagggaaaaataagtgacaagtgaggagcctatgagactgttgagttcggcttcagaagctgtcagcattgtcatcctttgatcctatgctgatgtgaaacaggcaggacaagacggcacatctgtcctccagcgcagtgacctggagaaagagctggatgtgtcacctttttgttttttgagacggagtctcactctgtcacccaggctggagtgcggtggcgcaatctcggctcactgcaacctctgcctcccaggttcaagcgattctcctgcctcagcctcccaagtagctgggattacaggcgtgtgccaccacgcccagctaatttttgtatttttggaagagacagggtttcaccacattggccaggctggtctcaaactcctgacctcatgatccgcccgcactggcctcccaaagtgctgggattacaggtgtgagccactgtgcctggcctggatgtgtaatttaaaccaaaactggaagtagagctcatttttataaactcctgggtctgaatctgggacctaacccctagttaaacttgagttctgtggggtcattcttaaagctccctgaaggacctgggcacttctagtcacagcccttcagaacttctgggacttggctttttgagtctcactatgaacagaagggagaacagcctcagggtcttctagccctacatggctttcagatcccaactttgaggcagaggaatcaagggcaggggccagttcccacatgttccctctcacgctggtggagcctcagccctggccatcaccttaatgcctctcccacttccctgggagactccttcttaccgccagctcaagctctcatcagcttccaccaaccacaggcaactttccgctcagcttccagggcagcacccacgcccatttctttcctaccagcaagcaactatgagaagacatgcccatgggcagaattcaatcccagaacaaaaatgatgcaggctttagttcacagagctgccagctcttggagaagccactctgaccagtgttttcacagaggttagaagctgcatcaacttaaggaacatcacaaacacacacatggccccacccaaggacttcactgtcaacacacacattaacgggggggaagggggaggcagcacaccaaaatcagcattatcaaaaggacttcaccatcaacacacattaacggggggaggggggcagcacactaaaatcagcattatcaaatgaacagataaacattaccaggctacacagagttaagtgcataattggcataaaggctcttgttatcccaagaacacagggacattcacactcacatccacaaaccgtcaagttctgtaacagcactaatagcaggaagcttttctccaactttgaccaaagaagctaaggcaagagagactcggccaccagggaaggacccagctctgctgcaggaaggggagagaacggagtcgggttgtacttttactcagaagcacaacgaccatctaacagaggacagagtcatcagggacacgctaagaagatggtgggtgaggttcctgtcctcaccttaggatggcatcagggacctgcctgagcttcaaagatcacacctgcaccaaaaagccaggttaactaagagaccttaacaccaagagggggccgaccgctcctctgagtaagcgctccttcagcgacagagctggcgcctcacgtatgcttgcggcgtaaggctacaggtgagcctggcctgagcatcagttctgttctttgcttcaagatcaccaaggtagatgaagaaagtcagcttgtggcatcctctatgcttcaaatatttcaaacaggaactcccggcaacatagggacattcacagctgcctctgaggtctctgaggagtctaggatagtcaggattgttctgtggcccccaaaatacccaaataagtggacgaaatgcccatgacgtagtcctattctctgctgcttctcctcggggcacagtctgaccccagtccaggacagggagagggaaaacgccatccccgtttcagcagcaggagaggtggttgagaaaggcctggctcagaagctccagaactgaaacaaaggaaaattggaaatgatacctgacatgcaggtgaaacctagaggagaaggccacagacgctggaagaacttggtcttgctgtctcttccactgacagaggcactagaagcttcactgaaggacccgcatgtcagttctgatggaaacacctggtgtttacaaattatctgtcaccacagactctggacccatcaacctgccgacggctgactgcacacagacgtcagacaagtcagtaaaaaaaaaaaaaaagatgatgataattaaaaaaaaaaaaaaaaaaagaagccccaggtggggcgagtccttcaaagagtggctcagttctgcaacaggtgtgacccggcccggagggagggctgcacgtgctttcttcaggtggcctccaggacggcggcttccagggccagcgcttccgcgggctcctcctcgtagtctgacaggtaagactccaggctctgcctggccagtgcctcccgccgggcctgcagccgctcgcagcgcggacagcttccagacttgaagcaggctttatggtaacacgctttacactctactcaggttgggaaggtgggggagagaagaaaacaatttgtattatctccagctagaggtcagttgctgccacagccccttctcgccaccaaggcgtggtgtcccctggggaggccccgcgaggtgctgagtggcaccgaactcttgctaacaggggtggctctggggaatcaaggagccctgtgttcaggctcacttgcccgatgcctgcacctgccctcaccttcacaggtccggcacttatggagctcaaagggaaagatgatgtcatcctcattctgacagaactcacagatgaagcctttggcttggcagagctggggaggaaaaacacagatggcaaaatgaggagcggcacatcaggaactggcacgggagggtgaacaccgaggaggggagtggtctacagggttctgctgcccacagggaggaggcctgggctggactcagaagcatgaaagctaaactaggaccagggccgggcagcgttagacaaagctttaggcagaagatcagacaggcaccagccggagaagctccgacccccagcgcggctctccatgaagagaggagaaggaggaaatggcaccacaaagggcttcctaagccgacagtcccatctgggtcatgattttatttcagaataggaaccacaagcaattaagataaaatgtggagacgaggctgttcctcaaacacagctccaagcctggagtcaggttgtagtgaaggatttccagttcctcccagacacacagggtttcctacctgtgcccagctcgaattatgggacggtcacaggaacataaactgggcataggctaagacaggaagttctaaaagtgtaatttctgcattttcaacatgttgagtagatgacgacaataacgacgtgcgtttgaggaatacataaagtatacaaaacgctgtcatacaaattaccccatcaaccctcaaaaatactgagaagaaagtaaattattctcttcatcttagagccaagaaaatcgaggcctcagaggggacaaagtatttattttggtcataatgactgagaacaacaaatgacggccgagggtagactccctctcgattccaatccagagctctcctctcacatcatgacaactgccttttttttttccactcttgtcgctcaggctggagtgcagtggcatgatctcggctcactgcaacctccgcctcctggattcaagcaattctcctgcctcagcctcccgagtagctgggattacaggcacccgccatcatgcccggctaatttctgtattttagtagagatggggtttcatcatgttcgtcaggctggtcttgaactcctgacctcaggtgacccgcccacctcggcctcccaaattgctgggatgagaggcctaagccaccgtgcctggccaacacttcttgagtgaaagtctactcggtcttgcccggagctacccaggaccacagccagcaccagctcctcccctcactcgaggttctttagatcaggatgatttggctgctctccaggctaaggaacagcagccctttccagttcctctcccagtgctgactggccatttcaacttcctcaagctaagtggcaagaaccccaggtccacccccctccctgtatccctaaaagcaagggctcagctgcatgctacagtgagactttctcaccatgcatctctccacatgggtagcccctgccctggtgagctcagcaagccggggccccagctcccccttcctggtcgcagtcaggtcattcagtgagtacaggtggaggtcctctgtcaggtggcctgggactgtgtcaaaggaatccagaagcctacagggagtgacaggaggcaggtgagggaatgaacagtgcatgtgccacatcgtagtagaaggatccctatccagaaactgcagaaagtaatgagggtgggcacccatcagccagcccaaggttccaggccgccgcagccgttccacgctattaggtgtctggatggcaggagtgactgatttataggctcctgcagagtggcccatgtgagacccagcctgggaagagaggtggcctgtcctggatggaatgaccacagatccccttccagagagaaggacacagatacagttactgctgtggcctcctgtttaccactttacagttctgcaaaatctctctactctccttcgttacataacaagagccaagcgcggggatgtgtccctttcggagacagcaacgtggccagagggctctagctccaaaaggacttactccttggccagtcggcaagtcttgaacatgttcttcatgtgacacagctggacccgcagcagctgaaaagaaagagaggggggcaggagtgggagggagatgtgagaagaggaatccagtgtgggaagcccagggcctttaaaccctggggttctagaagccttgcatgctgcacccagagcagactgtcctacgctctgacaactggctccagactgtcctatgctctgactcgacacctggcttcagattgtcccacactctgactgacaactggcttcagactgtcctacgctctaactcgacacctggcttcagactgtcccacactctgactgacagctggcttcagactgtcccacgctctaactcgacaactggttccagactgtcctatgctctaactcgacacctggcttcagactgtcccacactctgactgacaactggcttcagactgtcctacgctctaactcgacacctggcttcagactgtcccacactctgactgacagctggcttcagactgtcccacgctctaactcgacaactggttccagactgtcctatgctctaactcgacacctggcttctgactgtcccacactctgactgacaactggcttcagactgtcctacgctctaactcgacacctggcttcagactgtcccacactctgacagctggcttcagactgtcccacgctctaactcgacaactggcttcagactgttgtatgctctaactcgatacctggcttcagactgtcccacactctgactgacaactggctccagactgtcctatgctctgacaactggcttcagactgtcctatgctctaactcgacaactggcttcagactgtcctatgctctaacaactggcttcagactgtcctacactctgacaactggcttcagactgtcctacgctctaactcgtcaactggcttcagactgtcctatgctctaactgacaactggcttcagactgtcctacgctctaactgacaactggctccagactgtcctacgctctaacaactggcttcagactgtcctacgctctgactgacaactggcttcagactgtcctacactctgacaactggctccagactgtcctacgctctgacaactggctccagactgtcctacgctctaactgacaactggcttcagattgtcctacgctctgacaactggctccagactgtcgtatgctctaactgacaactggcttcagactgtcctacgctctaactgacaactggctccagactgtcctacgctctaacaactggcttcagactgtcctacgctctgacaactggctccagactgtcgtacgctctaactgacaactggcttcagactgtcctacgctctaactgacaactggctccagactgtcctacgctctaacaactggcttcagactgtcctacgctctgacaactggctccagactgtcgtatgctctaactgacaactggcttcagactgtcctacgctctaactcgtcaactggcttcagactgtcctacgctctgacaactggctccagactgtcctacgctctgacaactggcttcagactgtcctgtgctctaactgacaactggcttcagactgtcctatgctctgacaactggcttcagactgtcctatgctctaactcgacaagtggcttcagactgtcctacgctctgacaactggcttcagactgtcctacgctctaactcgacaagtggcttcagactgtcctacgctctgacaactggctccagactgtcctatgctctgacaactggcttcagactgtcctacgctctgactgacaactggcttcagcctgtcctacgctctgactgacaactggctttagactgtcctacgctctaacttgtcaactggcttcagactgtcctacgctctaactgacaactggcttcagactgtcctacgctctgacaactggctccagactgtcctacgctctgacaactggctccagactgtcctacgctctaactgacaactggctccagactgtcctacgctctgacaactggctccagactgtcctatgctctgaccactggctccagactgtcctacgctctgacaactggcttcagactgtcctacgctctaactgacaactggcttcagactgtcctacgctctgacaactggctccagactgtcctatgctctaactgacaactggctccagactgtcctacgctctgacaactggctccagactgtcctacgctctgacaactggcttcagactgtcctacgctctaactgacaactggctccagactgtcctacgctctgacaactggctccagactgtcctacgctctgacaactggctccagactgtcctgtgctctgacaactggcttcagactgtcctacgctctgacaactggctccagactgtcctacgctctgacaactggctccagactgtcctacgctctaactgacaactggcttcagattgtcctgtgctctgacaactggcttcagactgtcctacgctctgacaactggcttcagactgtcctacgctctaactgacaactggcttcagactgtcctgtgctctgacaactggcttcagactgtcctacgctctgacaactggctccagactgtcctacgctctgacaactggctccagactgtcctacgctctaactgacaactggctccagactgtcctgtgctctaactgacaactggcttcagactgtcctgtgctctgacaactggcttcagactgtcctacgctctgacaactggctccagactgtcctacgctctgacaactggctccagactgtcctacgctctaactgacaactggctccagactgtcctgtgctctaactgacaactggcttcagactgtcctacgctctaactcgacaagtggcttcagactgtcctacgctctaactgacaactggctccagactgtcctacgctctaactcgacaagtggcttcagactgtcctacgctctaactgacaactggcttcagactgtcttacgctctaactgacaactggcttcagactgtcctatgctctaacttgctctaactcactctgacaactggcttcagagtgccctctagtcagggaaggcccctccgccaggtctgtctgcccgagtcacataagcagtctgggcagaggagtgctccgaaattccaatttcttactcgatacccgattcctcattcattcactaatgtttttagtgaaggaagaaattctgcttttgccctcaagtgctatctacagcttcctagctgccattgccacgtttgaggctccaactagacagataacctgggaaatgggaagagattaagaaagtacatagtgagggcatgaacggagagacggttatagctttgacactgcgataacaagaagtgtggtaattgtgggaagccctatataaccaggggaggggacaaggagaggagacgaggggaggggatggggggaggggacaagaggaggggatggggggaggggacgggggagggacgaggggaggggatgaggggaggagaagggcaagactctaaggtggccttttccaaggtcttacccggacttgattgagcagcttgaccttcctatagagggcactgtttatgtcctgcacgttgaagagaggatcattccagatcttaatgagcaggtccttggagaagttgctgacgtagtacttgctgaagtcccacttgcgcagaacccggctggggatggccatctgggcattctcgtggcagcactggcagaagtacttgcccaggtactcacagtaccgcagtcgcttgatgtaatctggaaaaaccggaaagccagaaagccagatgtaactttcccatctacaagctgggaaggcagctctgcttttcccttgaaagggcagagagggacagccaatggcctccagcaacctctgtctgagttccccaaagcttgcagaaatccacatagtggatcctggggtgataatgtcctaccttggaggccctgaggaaataaaaccagctggagatagtaagatcccgccttaccagctagctggaactacccaactttccacaggatacaatcctggccatgtgctcccagaaatcatttccctccgattgccagcactcttgcctactacgaacctttctttctccttccctacttctgccacgccacctcctgctaccgcctttgacacgccacctctccctacgtgtcggggagggtacagagcctctggaggcagcatggtgggaagggaaggcactcaccagggtcagtccggatgccacatcctgcacagcggtaattctgcttggccacggcaattttcctcctgaggaagggtaaggacagggcattggcacagagcagctgcgtgagaccttggaggtgtgaaggagtgagcacacatacatacagctccagttaagtatgggaagagaggggaattcacctacattttagttggacaaaaatgaacctattgggagagctaactccatataagatttaggtctaggcagtcactctgcccagtaaggaaccacacattctgtacaaatataaggaatgagatgtggtaaaggagagagaatgacaggagagaagagcatccatctatcttagaaagagaagaaaaaccagcaagcccacacaactactgggaggaaagctacaggttgggaatgccagcaaaacaaaacccgcctcgtttccaattagctccaggaattaagagtaagaaacgaaggaccaaatggacgacgccccccctctgcctttaaatgaagagaacggtgtgggaaggacagctggaggcagggacaagtgggtgagacgaaaaccctgacaatccaaagaggacggatctgtgctccaaagggcacagacactggccactcacgttggggctggatgaacattaaaaattatctgaggccggggcggggcccactccaagttgccacgaacacgaatccgcagcttgtagatgtcagcgtgctgcccgtcatccggtgagatgggcagtgagtcaggaatgggcaggagctgcaggaggaaagcacagttggggtaagctcgtgtcagtgtgctgcccgtcatctggtgagatgggcagtgagtcagggatgggcaggagaaaaacacagttggggtaagttcacacggacgggcttgagaaacagaaatgcgggacccttttggccatgacagagcataatgagtgaaagacatttcaggaacaccacaggataagggcttcagggaacctcagaaacaaccaggaggcgccaaggtactacaagtgagggccgtgggttccaagaagcaaacagaaacagcctaccagggcagtggccccacggctcatgctgtccctgcacccatcccaggacccttgctgtgccagtgtgtttcatgccttaaagacaactgcagagcaaagaatccaagcgatttacttttgcgtagtgtctccgaggtggtcacaaaccaaacatgactgagtctggcgagcagtcacgtgaataaggaccgcgaacgcgccgtcatctctgctctgacaaggtgagcaagcattcactcgttcatttatcacttgacacattgtaatgaatggcttccacgagtaaggggggaacacccaggctcattccagactagggacatgtgacgaaggaaaacaaggtcacagaggctcacgatggcccctgggtaggaagaagagctaaggacctaccttctgaggggcatcatgctccgggacaagccactccagctccgaggcggctggaagctgcatcccctcaaactgcttcaggagccccatggccaccgcctcagcagacgtggagtgcaggaagcagtgggagctggaaaggggagaatcaaggacggctgaacacagggaaaggatgggcgatgcgaggcttcccttcatgatctcatcccccacgcagcaacttctgggctggaagaacacccgcagcaccctggcctgctcatcaccctcacacatgggacagtcaaagtccactagtctcacggtcctaagacttcggttcaagccccacttcctgccactgcacggcactgctaatgaaggactctgtcacttcctttctctgaacttcagctcctctaacagcaaaatggagattataatgcctgcttacaaaacaaagtgagtaaaattgctttgtggactacaaagcgatttttcctcccaaatgagctactgtgtcccctggttgggtctatgatgtggaatctgttcaatttgatttcataaccaaaaaccatcatcactgctctcttttgagaccttctggggcctctggttatgatgagagtcagcagagaaggaataactcacttccagctttgcctccacgagagcccatcccactgggaccaaagagcttctgctttcttcccgtgggctcggcaccatcagcaagcccctccctttaacctcgcctcctcttacatctggatggctttgcccagccatacaccaagaactgggtttgtttctctacatatcctaaggttttcttttcttttttttggtaaaaaaaagtactcacaaggactgggaggaaacgaaggatttgctgcttgaggctgtgttccttctgatgtcagcatctacatggaaaccagagataaggggagcgcaatggaaacggggtgggtaagggaacctggaatctattacaaggtgctcccagctaagctctcagggtaacagccaggtgccacactctatgcaggagaaaggagcaggtgaagctctaaacacaggttataatttgcctctatccaaatcaaaaccaggctgaattagtaacattatgcatagcactgaaaaggtcaaagtgttacaaactcaggcagaaagacaaactcagctttggtgtaaaacagtgaatgagaagacgagcatcctaaggcacacagggacacaacccctcatatgcacaaacacaaaacaaaggactcaaatctctccctcactctccacatcttaacctttctcaaatggtaagctcccttaggcagtaactctgtctggcttatatatatatacatatatatatacacacacacatatatacacatatatatacatatatacgcacacacatatatgtgtgtgtatatatatacacacacgtatatatatacatatataaaaaacatttagtgcctaacacataactgggatcatagaggttctcatgaaatatatgtgaaattggaactttgcttctaatatttcaccactgttgccattaccccgaatgttagaagtgtctgcagttttgcctctaacatgtcatcactgttgccattttacccctgaatgttagaagtcttctatatccttagaaaagcttcatggaggaaaaggaacttctctacagctttgcagctctctggagatgcctggttaccaacacgttttgacaaagatggtcaacatgacctctgaggctagctatacaggaaactgtggcagactttccatagcctatttctgacaaaggatttagaagacgatttctaataatgatatgctgaacctccagagacctcagagacctcatctacccaaatacttttgatgggggggatgtgaaatacagcagttatgttcaagccaggcagacacagcctatccaggtcatgaaaacaagactgttctgataaatactctctctcatgtccttcactgcccagtgaaaagacctttctttcctaatgaagccgacacaatgaccaatctaccatgagcactcagaaggacaccaatcttgtatggcatctctgtgcactgggctgtgagcagctctactgttcctcacgtttcctctgtatgcagatttttgtctggacaactagattataaaatcaccctaacaagaaataagattgtgtcttattcttcccttggctctaaaatacttaacacagggctcatatacaaacatatactcaaataacattgttgacaaactaatgtcttcaaagctacatgtatgagtaaggtaacagaagtcaaatctgttggttttcctatgttctctgagcacaggacaagacatcgacacatttttgctcgtaattagcatagcctatttcacaacaaagatgttcaagtatatcatgttttctggcggaatctgtgccacaaaacccagatcccagtgcactgctagctgtcttatttctggctagttagtgctggtagagaaaagaaaaacagtagaggcaacagtaggccagactttcacagactgtttggtttgcaacatttatttgggtaacacttacactgccttgggctgtacctaagtcttgccttgagctaggagccctcagagtgctttgtacataaaggttttcagaaaacattttctgaataaatgattaattggctaaaagcaattaacagctatttcaaattccatcctgtttgggagtaacacaaaagaaaaaaaaaaatcttagctatccctgaataaggagctaaccaattttcttattttcgtgccaggctattaaagaaaatactacatgccagaaagaacagacaggtggtaattcatggtttctaaggaaaccattgccttcataaaactatttagcagttctgtatcctcacagagaagaaaccttttttttttcctttgagagaaaaaatcattctctcttcagaaaatacaattgagtcacactgtaacgtgtttcttccttttactagaggtaaagtgaggtcggaggtacatgcaggggcttcctaggcaatcatgaatacgtccaagagtggggaggggccacccagcttcggaggcaaggctctgaccccggactggagggagagaagcacactcgtcaaaggggccatgacccctgaccccggccaaggaccacgcagctctgcgggtcctgggcctgcgctgcagccctcatcactctctggtcggttcaagcagacaactaagttgacacgggtgaaaccctactgaagatctggataaaagcagaccaaggtctaagccagagaactgaggagtgaagagagggggagctgcccatctggatggattcaacgtgtcccaagtgagagcacttaagaaggaggtccgagacactcagcatccaagtggaatttaacacaattctgaaactttttattgatttttttgtacaaaaacaagtattgttttgcaaaagaactgatttcaggtgcttctgatgcatcagatattaggttgagtcatcgcagtttttgccattacttttgcaccaacttcatagaataaggccattattactgactgaaaaaagtttaaaaatataaaaacaagtaacaacaaaaacaatgacaagttataaggagaagaatttgctgcgtgtccagacactggtattgaacgatcagagaagagctggttaaaaccttggtaccttagcaaactatgcaaatttttaaacaaagtaagtgagtcacaagaagagtcaacttcagaatgtactggccagtttgatgccggtttccatcctgctttctttctagaagataaggtgatacccaacgtatctgggaatccaacttcaacacattttctgtaattgctgactcaaaaggaaacacttcaaaatggagaacccaaagtattcttgttttataaagaggaaaaaaagtaattaaaaaagggatgggggagaaggaactgattaccttgaccttgaattggatataattttgaaacttgtcagaaagtatagctcatcaacgttcctttttatctgttatgccagctatcaatttattgtctttcaactccaaatctgcccttgtttttgcctgctctgcaataacggagctggacacagaaacatttctcctttgccagctggcatgatgtgaggttttgtggtagggggcactggaggggtgctggaggcagaaggggtttctccggctggctctggttgctcctctaagctgactccgggggaagcacaccttgggcagctttgcagcagagtgccatgagtgacgccctcataaacagctccctcggcacctgccggaagagcttccctggagagctttacagtgagtgccactggcctaccaccttcccacagagggctttcaccagtacccttgggttctgagatagcacctcccatggacaccctccctcagcaccccagagaacagtttcctggtgacagctgctggcatgccacctccctgtggagagcgtcccctggcaccatctcagggcagctctgtgtttcagggaaccccaccatccagcaagccaggacgtctggatctcagccttggggatgtatcactccttcacatttattcctaccccagatgctccatctcagccccagggatagtgactgctcctctatctgctcctcctgtgcaccccctttttcttttgaggtgaagtttcactcttgtcacccaggctggagtgcagtggcatgatctcggctcactgcaacctccacctcccaggttcaagcaattctcctgcctcagcctccagagtggctgggattacaggtgcacaccaccacacccgactaatttttatatttttagcagagacagggtttcaccatgttggccatgtcggtctcaaactcctgacctcaggtgatctgcccgcctcggcctcccaaagttctgggatgacaggtgtgagccaccgctggtctcaaactcctgacctcaggtgagctgcccgcctcggcctcccaaagttccgggatgacaggctgagccaccacgtgaggcttctcctgtgtactcttgagagtcttctttactcctcatgagccagtttcccattccatgattcccacattatagtagaaataattctttatattaaactttccctattcaaattactgtgtagtttctgtctcctgatcggaccctgactagatacatctatgcacaagatgaaaattcaagaagaatctacaaaggaagataaagaaaaattgatgcagctataatagaagaagatggagatggggaaaaaaatagcaacaacaaaactctaaatccaaagaagctgaaaagactgtctgagattgggagcctatgaaagatatcaaaccaacttggcagacaccatcagcagaagtagatgacgtgaaagacacaaaagatgacgcatcacacattggataattccatttatacgaagtgtccagaaaaggcaaatctacagagacagaaagacgagcagctgagtggggctgcgagtggagacaggaattcactgtaaactgacacaagggatactactggggcgatgacaatgttttcaggctggattatggtgatggctgcacaacttggtaaatttaccaaaaatcgttgagttgtacacttgaagtgggtgaattcttttttttttttttttgagacagggtcttgctctgtcacccaggatgaagtgcagtggcatgatcatggctcactgtagcctcaacctccccagatcaagcaatcctcccacctcagcctccagagtgctgggattacaggcacgcaccaccacacacagctaattctaaaatatgtttttgtagagatggggtctcactatgtttcccaggctggtctccaactcttggcctcaagaaatcctcctacctcaagcctcccagagtgctgggattactgacataaacagtcagtatgcccagcctaaaaagcagctttttaattgaaaaacatttcacattcttagtgtaaaacctgtcatgtgtataaaaattttaaagcccccaaaatggggaaaggaagcatgctagaaagaccaaatcaaggcctgcctggtggtgagtgcagattggacatgctctgagggagaagtggctgacactcaacacatgcccccacagaggactgggactaaacacaccggaaaccagttagaaagggagtcaggataactcctcctcaggcagggaagactcatgttagaatcaatgacagtcgttcaggagtaggaaaaaaaggaacctaattacttttatttctctaatcttaaaaaaattaagttgataccataatatttgtacatattgacagggcacaagtgatattttgatacatgcatacaatgtgtaatggtcaaagcagggtatttagaatatccattgattgaacatttatcatttctctgtgttgggaatacttcgaatctcttctagctattttgaaatacagaatatgtcaactacagccacgctactgtgctactgaacactagaactcatcccttctaactgtatggttgaacccactaaccaacctctctttacgccccaacccacctcctccccagcctctgtaactatcactctcttctctacctccatgagatcaacttttttagctcccacatatgagtgagaacacgggagctcctgtaatatttgtctttatttctctaaatcttgatctaatcttacacaattatttcaaattctaatgcccaacaatattaaaagttttaataaaaagttctgggcctggcgtggtggctcactcctgtaattccaacacgttgggaggccgaggcaggcagatgacgaggtcacgagtttgagaccagcctggccaacatggtgaaaccctgtctttactaaaaatacaaaaattagccaggtgtggtggcagctgcctgtagtcccagctacttgggaggctgaggcaggagaattgcttgaaaccggaaggcagaggttgcagtgagccgagattgcgccattgcactccagcatgggcaacaagagcgaaactccgtctcaaaaaaaatacaaaagttctgagttttgttgttgtttttgtgttttaaagccattctgagtagaaaactgctactttctttcaattaacctcacctacaggaaacctacttatttggatcacaaagcaagaacaaacatctacagcagtaaatcctacttgtacacaaagtacccagaagagatggctttctaaaagttggctctgcaaattcaaagttctaaagagacagtaagcttcataccattctatcctacttttgctgtctgaatgtgtggcaggagcttaggtataggtttgaactaaaattcttcatctaactattcctttctaaactgtccactacctccatcagtcacaatggccactaaatctaaatttatcaccatagggaaggatcaccaaggacaaacttgtgaggaagattgttggggtcacatgaggaagaatcagtgagtatctgaattgttcctggcttgttgttctggcttagctccagtttcttccaactagttctccagcccctacagtcctcgtaaccttgacagttatcacatgattaagtatatacgaaagctggtgcaacattctcacacatgcatctacaagcacatccacgcttgcaaagtaggctacctgagaacatcgaggccagtgacactgacagtccgttctttgatatgtgagtcaggttagatccttcgctaccatctgtgtaataatgatgataaaagggggcccttagtattccagcaggaaataaactaatattctataccatatgttcctggaatcaaaacttgccatttgctcccaaacatgaaatggcgtttaggaacttgcatccttgggtaggtgctcactctagcttggaggagagttactgctacttcctacgccaagcccagcctcaaggacctcctacgacagtggttctcagccacgggtgattatggcaatgacggaggcatttctgattgtcttgatactggggaggggttaccactggcatctagtaggtagaggctaggaatgacactaaacatcttacagtccacagcccaatccgtcacagcaaagaatgatctggcccacgtgttgggaaaccccggcctaaggtcttttcctttaaggatttctgttctgaaacgactagagaattactgattgaacatctcctcagggcctacaaccgcagcaacagtttctaacaggagtgtgctttgggcctctctctcggcaggctccttacagactgcacagcttcccggatccctgctttgctgcaggaaacagatgtggtagtcaagtggacggatctgaatttacctcactattctcctcctgaaattctgactgctgatcctgggagtgaggtcagaccctctttctttttttttaattaggagatgaagtcaatcacagactatggtataacagtaaatagatattttgtctttgtctccagttcctggtgagaattcctaaaattcttggaatttcttgaatcattcaagaaattattcaaaatacgcccctttcaatcatacctgagtttatgctaatgaggagactcctggcaggcccctagatagacagcttcacaattggggcaattgggggctatcgaaagaaccaaccacgtcattagagggttagagcttttactcccccatcgcctccagggaggggagagggatcgaagactcagcccagtcaccagtggccgatgacttaatcgatggtgcctatataatgaaacttcaataaaaacttgaacaatgatgtccaggcttcctggttggcgaacacatcaatgcacctgggagggtggtgccccagacaccacgggggcaggacgagttcctgtgctcgtgatctcttccttagtccctgtgtacttcttcatgtggctgctcatttggatcctttacaacagactataagcataagctttcccaagttctgggcatcattcaagcaaattatcctgccttggggaagggggtcgtgggaatctctgaatttgtagtcagcctacaagcagaagggcaggtagcttggtgacctgtgtctggcatctgaagcggaattaatttcacaggactgtagctgcaggatccgtgctaactccaggtagttagtgtcagagctaaattgtaagtcacccagctgatggtagagaattggagaggagttggaaaatcacatacaaacaaccaaacaaacaaaaggagttttaaatgactacctattgttgtcatacatagaaatcagagacattaaggagaacatagaaggaagacttcctgaatacctcgaaaatgtgtgaaaaaacggagtttctgaatgggaagaaacatgtggttcctccatctggaggcctgtgcaggcgaatgggctctctagattgtgtaaacaggaaatcaaagcctcttgcaacacaagacctatctgtcatcacattatgttataatggagaattatagatacagttcacctctgtctacatacacaatgttgtaacagagaattatagataccattcacttcagtaaggaaactactcttagtttcacccatgaaggaagagcgtttgtccctgaactgtttttttgtttgtgtgtttgttttgctgatgggaacttgaagagatctatgatttgcaggagtgggacattaacctgatttaacataactgccttcccagactggaaccccactgttcctctatgctgatactcctaccaccaccaccaccaccaataaaaacagagtctgtgactgtgctgagcagtgagcaccgaccgcaagggcagaaattcaagctctactttgtaaacctgatgtttttcctcttttgtccccctgcccccaatgattctttttgtccttttctcttttgaacactctgaaacaatttcagttgtgttatggaacccaagagaataggattctaatttcaagtggtatggaccagccctacaagctgaaaggaggagtcagagtgggaacccaggagaaagacaccactgaggaggacgcgtcagggtgacatcaacgagcagccactccatccacctggaacacctgcttccagtgttcttccctactgaaactgtgaaggggttttgtttttagcagaaggctgtcccttacaatagctaacaacaatccataatgaagatcttctacttaggaaacacttcgcagcttatcattctaaatggaaagaaacagaataaaagttcccttgtaacaaagtgtcacttcttaccttggatttcaaattcatcaacctcatcagcagagccagagtcagagagctgtgccgaatcacgtgagctgaactgggagctgctggaggtgacccgaaagcctgttatgtttaaaaacaaaaaggaataaacagggcagaaagaggtcttcttgtccttccagtgtcacaatataagggatctgatatgacctcaacagagagaaatggaaactttccctttagaaagtttcaagtaaatagaaggtactactatctgggaagcaaatctgggagcagtgttcttaggtctcctcatatcaggaagctatttgggaagggagctattcctttatttatatatatacatatatatatttagagctggggtttcaccatgttggccaggcaggtctcaaactcctggcctcaagtgatccacccgcctcggcctcccaaagtgctgggattccaggcgtgagccactctgcctggcctggaaggcaggtatttctgatgcaggaaacggagcgactctaggatgagtattcctagcatgatagaaaaaaagtaggactacatagaaacatctgacagcagaggaaccactggtttgggcaccaggccttatgctgaagttgggaaaatgtgggaacagaagcatccacaggctccactgacttccgtgctcagcctcctggtacatggggagcaggttcttggtgcggatttgctggcgccgaaggcggatcttctgcttcagctcctggatctctctatcactgtcttcctcttccacttcctcctcctctaggcactggctcatcatgttgcacttcattagctcgatggcagcaattaaggactctgagatgctgaagtgggcattctcctggcggaaggagagcaccaaacaggcaaagggttagaagtattgaatgacatactcattataatgtggaaaagggagtttccaagataggaactgttcctgccaaaaacaccctggagaaatggacatttctactacgaggaaagctgatggctggaaaacctattctaggttttcttcactctcttactttgccaagcctgtcccttcctgtctcatttctacataaaaatatgatagagaagaggcccaggatttcaatcaggttctttcccaaaatcatacacctgtacacaaaatattaagataaatgctatgtctcaagataaaagtgctttgtagtctataaaatgctacacagatgtcatttattgcttatctgagccttagaacaaaagatagaatttgattctggaaacagtatttacctaaggtgccagagtcaagggaaccgcaatcatgcagcaaaaacaatgctgccagacgcagcggctcacacctgtgaatcccagcactctgggaggccaagcccaggagttcaagaccccagacgcagcggctcacacctgtgaatcccagcactctgggaggccaagcccaggagttcaagaccccagacgcagcggctcacacctgtgaatcccagcactctgggaggccaagcccaggagttcaagaccccagacgcagtggctcacacctgtgaatcccagcactctgggaggccaagccaaggagttcaagaccccagacacatgggctcacacctgttaatcccagcacttagggaggccaagcccaggagttcaagaccagcttgggcaacacagggagacctcccccatctctacaaaaaaataaaaaaaatagccaggtgtggtggtgcatgtttgtagtcccagctactcgggaggctgaggcgggaggattgctcgagcccaggaatttgaggctgtagtgagccatgaccgtgacactgcactccagcttaggtgacagagcaagactcttgtctcaaaaaaacaaaaacacacacacaaacttgatgcttctctgcccaggttggcttctaagataaaatcgctaataatttggactcagtgaggggcacatgctccctgcagagttcctcagaaacagaacttgctgagcttccctttaccgtgaacttatctttactgtaatctatacccaaaacctcatcagaacaaatggcaccacagaccttcagacccaatctcccaactcatgagctcttcatgaggccctcgatttcccaccttttccaggtcggcacagctgccgaagtcttgctcagagaggtagctgatgagggactgtccttctgatggtcttcggaacatgccttcccctgagcacaggtaccgaccaccttctgtgggaaatggaatgtggatgaaacagccaggcttcttcaggaagtcttaagcttttgtcattaaagatgctcccaagtcttcccaggtaactgggaattagaggttggaagaagatgtccaccttctaaaagaatttcttgcactttgggagggcaaggcaggcggatcacaaggtcaggagtttgagaccagcctggccaacatggtgaaaccccatctctactaaaaatacaaaaattagctgggcatggtggcacatgcctgtaatcccagctactcaggaggctgaggcaggagaatcatctgaacctgggaggcggaggttgcagtgagccaagatcgcaccactgcactccagcctgggcaacaagagcaaaactctgtctcaaaaaaaaaaaaacaaaacaaaaaagaatttcttggactcttagaatcccagagcactaagcctcttggttggaaaacggtagaataaacagagagaatccttctgccatctaaaattaaagagaacatgctctccctcgtaccatacagtaaagaaaaaacaaaataaaaatgtagaactttgggctgggaggcagaaaaggacacaaatggcttcctcctctgcatgatttccacatagagtctgtctgctggttactaagcccagatactccaaggcctcttttcaaggtccatctcatccactcagagagccatcccatctggaccagccgacgtacccggtgcgaacacccagcacgtaagagagggtgggacccccaagtcagagagaagcaagagaaatggcagagcagtgtgatttctagcacgggggttaaaaatgacaaaagagtgactgagactgtaacagtgtgtaccctccagagagctgagatgaaccccaaaactcagaacttagcaggcacaaggggtgagcagagaaaatatacaattttagccctggccttcctagtactcaccatattccatgtacagagagctgggtgtgctgacttcactgctttgaccagagtagggcaaagggcctctcaacttcgccttatcattgcaggattctaatgacgatgaccaccagcgagtaaaaacacatacgaaatgagcaacaggtacattcccaactctggagtttcaacacttaactgcaccccttcccaaagccctcccaagcaggagagaggcggcacaccaacggaacagcccaagggtacagaaacacagggagggaaggagatggcaggtcagtacattctaagtggaaaagaagaaacgtgatccagaatggggcaacataaaggaaagaatcaaatcaaaatggattcatggaatttgcttctctttccttacatcttttaaccaaacattacaggaatatcagctgattcctatcctcttgacaaaccaatttagaaaagtctttagatggtaaaacaaagacaagtgcattgaaacttttctgacatcttgacattaggttttaaagtaacatcagaagatttacattcactaaggaaataaaattcagcagcatcctaaaaagaagcatcaaggcagtgctggagaagcccagggagagggccctgtaagcaaagggctccgttacggggctcggcccggccttactgaagaagggagggagggaaggctggcgagacagacaatgcctgggacaggaagagcgagagctgggagggagaacagtagcaggcagggtttgcaggaatgagaaactgatattcttcacaaggaaacacaacatttccaggaccacagaaggaagaacaggtggaaaagcaggtgggtgcttgaaaatgagcaggatgctgtgggagagtgaatgactgagctgcatctaacccatttccctgacagatgttaccaacttgctcctctcacaaaaaatgctactctgtgcaagagacaattttgtgttcttcttgggcctcaaagacttctggtagccctggctgtgggctctgttccttcctactgaactgaggacaaactagtagtcgccacgatgccttggtaaaaaaccatgatatgacttggaagggaccttcaagattcccaaacagcacacaacacaaactccaacacgaccttaacctctttacaacatgtggccattcagcctttacttactgagttcactacctcctaatgccaccatttaactaattcttagaattcccttacactcgttatctgccttcttccaatttcttatctccttaagaagaacgctattctaaatgatggtcctacagactttattcctctttaaccatctgttttccaagctaacatacccaatggcctcacccacttccaggaggccacggctttcagccctctctcaatactctgccttgcagacacattccagtgttcatgtccatgaattatggtacccaggatggaacacaaatctcagtttgaacaccaccatgaacaccaaggaaacagactgaaataactagaagaatcctatgcaatagctggaatggggtgcagggatttatagggaaatgaaaacaggtgaaagaaaaaggaaacggaactgcaggagagggaaaaaaaacaaaaaaacaaaaaacaaaaaaaccaaacatgcaagtatatctaagaccacagaaaggggataaaatacattctggtgttaattcaaggaaaataaagtaatccataggaagtattcagttataagaaaaattctgggccaggtgtggtggatcacgcctgtaatcccagcactcgggaggccaagacaggaggatcacttgaagccaggagttcaagaccaacctgggcaatgcggtgaaaccctgtctctacaaaaaaaaaaaaaaaaaaaaagtaaaaaaaatttaaaaaaagaaaaaaaagtctgctactgattcatcatgatgcctcagacaaatagcaggcctcagtttcacctttgggcaaaactgaattgataagtcttgactctgcctcccagaagctgttgagagactgaacgaggcatttggaattgtgtatagaaaacacatcatatgaaatactggtatcattttatagacagttccaagcatcacaacaagaccaggctagccagacttgatttgacaccagactgaaggaggttctgaactaagaaaggtggtcacaaaacagaacaaagaggaggtggaggaccgattcccaaacctgcaatgggatcttcaactataatggtgatattcctggggcctcctgccggtagacagacaggtgcagaggagagtccagatagagcaatgagaatacagagagagaaaaaaagtgtcctaaattttacccagcagaagtggggatggaactcccaagaggaaaccccagttgtgaaggacggatggcttgtccaagaagctgtgcgtgacccatatttcctcagatccttccgcacacattttcgcgggctccctttttccaaggcaggattccactggaatccatatggattcaagaatggggcgggaaagttttacatgctcaaaggccagtggcttggagtatggcagacatcaggcctgcagcaggagatgtgaagtgagggtccagcccagtcatcttcacatctaagaaagctcatgggaagacaggctttgatttggagattcttctcctcaagatttccaacaagttaaatcacattcttgagggaaaacaaagacaaaagtttgtaattctgaaggtttcagatgagggccttagctctcacctttccagaaattacaaagagaaagcaacgctatctccagttgctaaagaaaccgccccctcttttttttaggtccttgaatttttcacattttatttttatattttatttctggggctttcctgacccagaatggctttgagcacaaagctccatgctatacttcctcttatggagatcctactacaaacaaaacccaaccaaagcctgccggataccacaagccgggaaggatgatggcagggagatggcaaaagcaaggagccccaccttccccacgagtaggctgcccctgctatcagctggtgtttggtgagggaggtcccagctgccagggcctccttatctgacggcctctcaccctgaatcagtgatgcggccgtcagccccaccgactcagttgctggatcgcatcaccctgcactcactatagccttcgttttaattagaaaccccagtatctctctgcctctctcacattggtattattacaccctgggcaaacttctaagacgtcacaggaaatgacagaacttaatgggattatttttaaagctcaataatactttccccaatccaagagatactttgaaaactcgcactatgagtcacgctatcctctgatgttaccaaactagtaaagaatccaggaaaacatttaatattagcaatgtataaagaaacaaacataaatagacttagagattttgagtctcagtatttcgttataaacttctttcattacaaaataagatgttgtatcaccagaaacagaacatctctttctgccacctgaaaagtccccataacaagccctctcttactctcaattcagggtcatcttgctaactagcagccggtgttcctcattacctggagctcccctggaggcaatgctggtatccgaatgggagcgaatgtggcttttctttgccccactggtgacagtgagtgtctgcccctctgagaagctggacctgcggaggacactggacagctggctctccccacctccttcctggtcccctaaggaagaggcagcagaatctggcttctgggagctgctggaggagaacaaattggaactgctgctctcggcattgctgctgtgactctgacagctggcagtccggcctcgggggtccaagttgccaatggccaggtactcaggcccctcactggcatcacctggggaatcattctggctgctgacccaggatgcctctatggggctggtcagagtactggagctcatttcatttggggtcaaaggggaatccctggctagtgcagagactgaaactgggggggcttggatggtttgatcctctgctggtgagacgtgccctctgctttcttgaggtttccggggagggccagagagtggaaaggaagtagatcttctctctagaatataaaaggaaatggtaaggggagcaagggtgaggtggaatcctgcagtatgtatgaaggactgggtgaccaggacatacgatgtcacctcagaaacggcaagccaaataaagtacaaaattatttagaagcagctaagtcaagagtatgggctcctgagacagtgctttattgcttattagtatgcattcctcatctgaaaaatgagcagtaagaggactgtttgaaggctcaaatgggataacacatacaaactgaacacaacagagcctagtacatgattggcaatcattcggtgttagctagtattgaaatgccttcttggcaatgtggattagaaacccaggggaatctacaaacatctctctcttctgttacttcatgattctactgaattatttcaagctagtcactatataacttgtaaagatgtcccttattaagaaaaactaccaacccaagtctcaattttccaagcctatgagcaaccacaaagtcttcttactttccagggctggggataaatgtaatgaccactttttcctgtccccatacctgagccattgttgggcacggattggtggaggctagagaaggacccaaagtaggaatgctgagcatagctgtttggaggggtgtatgtggaactgggcagggctgtcaggctctggctctttgtcaccaggagcgggctctcgtgctttctggcaaactaaaaagcaaaacaaaaccaaaaaatgtgtcagagttaaggacaaagggcctcagagtgggggcaacgcagtactgcagaaatgccatagaagctacctttgcagtaggcctggactttagccagagcctgtagatacagcaaggctaccttctactacagtatgtaatttacaactgtgaaaccacagcatctgcactggaatccttccaggtgttaaaccaggagtactttattacagaggcagcacaacaaagtgctgatgtatgtggaatcagaagtcagacagactagggttcaaatccaggccctgacacttatcagctatttgatccaaactttggaccacgtatctactctgtgcctcagcagcctcctttataaaatgagatcaatgcccacttcacagggttatgaagagtcaatgacatgatacatttatcatacatagcaccgtgcctggcacatacaaagtattaaatggatagtaaccaacaatcaaaattaaacgaatcaggccgggcacagtgcctcacacctgtaatcccagcactttgggaggccaaggcgggcaaatcacttgaggtcaggagatcgagaccagcctggccaacatggtgaaaccccgtctctactaaaaatacaaaaattagctgggcgtggtggcgtgcacctgtaatcccagctactcgggaggctgagacaggagaatcacttgaacccgggaggcggaggctgcagtgagccaagatcatgccactgcattccagcccagcctggacaacaaagtaaagactctgtctcaaaataataataatgataataattaattaaaagaatctggagagataggggatctgcttctctaagaagtggggactctgattccattctagctaaggcactgactggagtattagtgatgggataagttaattttaggcaacaaattttctttgtactataaaattttctttacatcaaagaaaaaaacatgaaaaaactgaccccgtgtaacattaagctatgccaggtctgacactaaactctatccgattcaaaaccatccctcttttccccagatctttgtcaaggcttggtatcctttgtcaaaagataccacaggtttaacaaaatctacctccccactccccagcttaggtctactaagcacacgacctaagcctagactttctacttcaataggtacttaacagtacctcccctcctccaagcattttaaatgaaagctggccgggcgcggtggctcaggcctctaatcccagcactttgggaggccgaggcgggaggatcacgaggtcaggagatcgagaccgtcctggccaacatggtgaaactctgtctctgctaaaaatacaaaaaaatagctgggtgtggtggcgggcgcctgtaatcccagctactcgggaggctgaggcacaagaatcgcctgaacccaggagatagaggttgcagtgagctgagattgcaccactgcactccagcctgggaaacagagcgagactctgtctcaaaaaaaaaaaaaaaaaaaaaaaaaaaaaaaaaaatgcaagcctttcagctcacaaaaatggctaagtgaaaaagtttgctgtagagggctacatcctgctgagctccagggacccagcatagacgtggataattccttgtcccctgtaccatggacgcatcgatctgagccaggaggcgggggttgttctgttccactgcttccaggcactgcagcatggccgtgacatgagcgtcacttagcaggaaggcagcatctggggagagaaaagctgccacagtgatagagcccatcagggaggccttgagagaagcttgaggaagcagaaagggagaggtaaggatgaatgaggaggagggtgaaggcagatcagaaacaaagtagaggagaagctgaagaacgcgaggtgcagcaaaatggccagggcaagaggcttcaacgtcagaaaaatccagatttgaatcctggctctgagtgactttggccaagtcgcctaacctcctggagccctgtggattggaaacagtagcaccaatgcccaactctcggggctgctgtgaagatactggacagcagtgacgggcacacaggaaactcgtggtaaatggtggctattcttacggtttgtgtgtgtggccgtaggggacgaccttaacataaagctggattgtgtcttacttgggaggtgagaggtaagtctggatatatgtttctgagtagaatccctatggcatcaagtgaaaaacaggaggccctgccgggcacggtagtcacgcctgtaatcccagcactttgggaggccaaagcgggcagatcacctgaggttgggagttcgagacctgcctgaccaacatggagaaaccccatttctactaaaattacaaaattagctgggcatggtggcacatgcctgtaatcccagctactcaggaggctgagccgggagaattgcttgaacccaggaggcggaggttgcagtgagccgagatcacgccattgcactccagcctgggtgacaagagcgtaagtccatctcaaagaaaaaaagaaaaataggaggccctggtaccagaggggtagaggatagtgaggtgggtgacaacgaggaagcacagatgacagtcctaagtggcctctacctacctgtgtagaattttctgatatactgtctatccccgagcaggggccggagctgggctgagaggcagtggtactgcaggctgtgctgcagccacagctcggcaacagcacgttcactggcaccatcagcactgctctggtcgttctcgtgcacgctgatgaactgggaagcaaaggggcatgagtcaaaacacacatcctggtagatacggcaagattgaggcctaatgacctgagaactaaattgagacaggtaagggaaatgctttgaaaggcttcaccctgggtcccatgtaggcaggcttttttgaaaatagcaaaactttttttcccttccccagaggagaaaaagtggcctggaccaatgggtttgcatgttttttttttttaagcaaataaagtcagtccctacagggataattaatttcctttcctcagctgataggcaactggacatattccctccttggagcctagaagattcttctgacagagcctcaaacagtgaagacccacagctctgccagcacagccgctctgctctcactcttaccttctccacgtgaagggctgagtggggactgagccaccggatgtctttcacgaactgccagtaatccgtctggcggcggcacgcctgcaaagggaacacatacaatgagcaaatcacgaccattctggaccagatctagttctagggttggcattcaaagataggaaaaggaccacaaccttcccttgcctcatcaaaggttcttagcagcaatcaaaggatacacacagaggccaggggtggtggctcacacctgtaaacccagcacttcaggaggactgcttgagtccaggtagactggcccatctctacaaacaatttaaagcttaccccgagtggtgggacatgccttagtcccagctactcaggaggctgaggtgggagaatcacttgaacctgggaggtcaaagctgcagtgagccatgattgtgccactgcactcctgcccaggcaacagagtgagaccctaactcagaaaaaaaaaaaaaaaaaagaaaaggaattaaaaaaaaaaaaggaatactacacttgacatatgtttacccttttaaagaataattgttaaagattattttaaccattcttttgaacaggtaacatatgcatatgacatacaaggtatacagtaaaaataatgttttctttttctttttgtttgagacagagtcactctgtcacccaggctggagtgcagtggcgtgatccagctcactgcaacctccacctcccatgctgaggcgattctcatgcctcagcctcccgaacagctagaactacaggcacatgacatcacgcctggctaatttttgtatttttagtagagatggggttttaccatgttggccaggctggtctcaaactccgagcctcaagtgatctgcccgccttgggtcacttgtgttgggattacaggcatgagccaccgtacccggctgaaaataatggtttctactcctttctctctaccgttctgttttctaaaaaataattcttaaaactggtaaagagctattgttaaaagccagagctggatgtctttagcccctactgcaaaagcaaaatcaaataaggaaacatctacttttccacgccacccaggtcagggaagagctgtggaggcaaagaaatgcccagaccagatgaaatggtctcacgctgggacaggcctcaacatgcaaaatgtttgtaccataacaacccaattgttgtttttcgataaccttttctgagactactgggtagggattaaaactaaaatctaaataattaaaaatatatagagctagcacaagtatcaagagacagaccaggccaggcacgatggttcatgcctgtaatctcagcactttggggggctgaggtgagcggatcacttgagcccagagtttgagaccagcctgggcaacatagcgagaccccatctctactaaaaaatccaaaaagttagccaggtgtggtggcacatgcctgtagtcccagctgcttgggaggctgaggtgggaggatcacaagagcccaggaggcagaggttgcagtaagccgagatcgtgctactacactccagcctggatgacagagagagatcctgtcttaaaaaaacaaacaaaaaaagagacaaagaccaatcaatggtacaaaataaatagcctgaaagagaccttaagatatatcagaacttaatacacgatctaaaaccacctcaacagtcagaggtgcttctttgtaaaaagtctttcttctcgcctctatactgcgagggtagaagtgagaaccggaaatgtcagatgtgcaggctcttttgacaataaacatcatgaagaccttcagtattctggtggtagtgcggcagggactctggtatctggttgagtggattttaagtggccagccagggctgggcagccgtgggacatcaactccagcatgtctcttggttacatcatttttaagtgaaaagcgtgtaaaattgtggccgggcgcggtggctcacgcctgtaatcccagcactttgggaggccgaggcaggcagatcacgaggtcaggaggtcaagaccacagtgaaaccccgtctctactaaaaatacaaaaaaattagctgggcgtggtggtgggcgcctgtagtcccagctactcggggggctgaggcaggagaatggcatgaacccgggaggcagagcttgcaatgagccgagatggcgccactgcactccagcctgggtgacagagcgagactccggtctcaaaaaaaaagaaaagcatgtaaaattggtttcttttcttcagacaaaattttaaactaacttaaacccttaaataaactacttttttgtttgggaaaaaaaatggaaaaaattgattattcaagaaatattgttgagaaaattggctggctagaagtagaccaatttaggcattctcctcaaatcatagaaaataaatatgatttattttataaattccagaataaattccacctgtattgaagagttaaaaaggaaaaaggaaactacaaatccactaagaaaagtaaggatattggatttctatgcagataaaagttacaatgtttaaaagcagaagtgcaaatcaagccgggtacaggggctcacgcctgtaatcccaacaatttgggaggctgaggtgggagggtcacctgagtcaggagaagttcgagaccagcctggtcaacatggtgaaaccctgtctctactaaagatacaaaaattagccgggcatggggcacatgcctgtagtcccagctactcgggaggctgaggcaggagaatcacttgagcctgggaagtgaaggttgcagtgagctgagatcaagccactgccctccagcttgggcaatagtgcaatactctgtctcaaaaaaaaaaaaataataataatgcaagttctgattcagcaggtctttccttgctacaaaagtgcaaatcataaaggaacagagagagggataaattttatgaataaatttctttacataaaaaaagaatgtttagcattttttatgatagcaaataaagaaaaatatgtaaacaattttttttttttccaagacggagtcttgctctgtcacccaggctggagtgcaatggtgcaatctcggctcactgaaacctctgcctcccaggttcaagcgattctcctgcctcagcctcccgagtcgcggggattacaggtgtctgccaccacgcctggctaatttttgtatttttagtagagatggggtttcaccatgttggccaagctggtctcgaactcctgaactcaggtgatccacccacctcagcctcccaaggtgctgggattacaggcgtaagccaccacacccggcctatatgtaaacaacttgaacatttatcagtagagtactggttaaattagggtacacttgtaatatatacacattaaaagcaatgctacgaagaaaaaaaaagactacagtggtagactcaaaaaaaaaaaaaaaaaaaaagagcaatgctatattctttgctgaaagaatggctttccaattctcccaacgttgccaaagaagcactcaagttgggtatagataattctctagaataaacatgcacttttactcccaccaattgagttgtggcttaccaagaatcagttatttttgttcccaaacctattcctgtcagttgtacttgttataatttcacatttaaagtaatgattatgcactttgaggaaatgactgtatttataaacactagtatgctctgaaaagccttttcagtaaaggtaagtcactataaagagttgatactgaattaggtggaggcaagacaattttcagaagttaggggaaaaatgaaaaatgaaaattttatattcatactacaggattttttaaattgctggctcagtataaaagaaattgaaactggaaattctatcgcatagtttatataagaaagatgatacagactccatcagtgggcccatactcacagaataggctttgacccaatatcctaagattgttgaatagatataaatttatgttttaaattaaaataaaatgtttgagttacatatattatcactacttgatttccctcacttcgtcaatcagttaatgatccaggtcatgttgcataagcagttttttcctgttcttatcgaaaaatggtgtggagttcacagagtaaataaaagaacaaatgtttgcatgttgagggaaaaaccaccaccatcaccaccaccaccaccaacagatgctgtaagaatgaggaactacccgctaccataatgaaaagctactatgggttttttttttctttgagacggagtttctctctgttgcccaagctggagtgcaatggcgcgatctcggctcaccgcaacctccacctaccagattcaagcaattctcctgcctcagcctcctgagtagctgggattacaggcttgcgccaccatgcccggctagttttgtatttttagtagagacggggtttctccatgttggtcaggctggtctcaaactccccacctcaggtgatccgcctgcctcggcctcccaaagtgctgggattacaggggtgagccaccgcgcccggcctgaaaagctactatattaaaactgagtggtgatggcaaataaacagagaacaacacaccagaatagaaattgagaagttgatacaaatgcataggaaattaaatacattccaaataaattacagatggaacaatttgaatgtaaaaaactaagccataaaagtaatagacaaaaccatgggaaaacactcttaataactgcagagtaggctgggtgtggtggcgcacacccgtttaatcccagcattttgggaggcagaggcaggcggatcacttgaagtcaggagttcgaggccagcctggccaatatgtgaaaccctgtctctactaaaaatacaaaaattagccaggcgtggtggcatgcacctgtaatcccagctcctcgagaagctgagacgggagaattgcttgaacccaggaggcggaggttgcagtgagctgagatcgtgccactgcactccagcctgggcaacagagtgagactctgtctcaaaaaaaaaaaaaaatcacacagtagaaaagccctttctaagcaccacacaaagccctaagagaagtcataaaagaactgattaatttgacttactaaaagtcagatattttggcacagtaaaagccaccataagaaatgtcaaaagacggccgggcgcggtggctcatgcctataatcccagcactttgggaggctgaggcgggtggatcacctgaggtcaggagttcaagaccagcctgaccaacatggtgaaaccccatctctactaaaaatacaaaattagctgggcatggtggcacatgcctgtaatcccagctatttgggaggctgaggcaggagaatcgcttgaaccccagagtcagaggctgcggtgagctgggattgtgccattgcactccagcctgggtaacgagtgaaactccatctcaaaaaaaaaaaaaaagaaagaaatgtcaacagacaaactaggaaaaaatatttgcaactcccattacaaaggactaatttcctcaataaataaagaatatctataaatcagtaggaaaagactaaatctactgaaaataggaataaaataggaaaaagttcacagggaaaaaaattcaatgacacttataatatcttttcatgctaagagaagtgtaatcttttacttttttttttttgagatggagtcttgctctgtcgcccaggctggaatgcagttgtgtgatcttggctcactgcaaactctgcctcctgcctcctgggttcaagtgattctcctgcctcagcctcccaagcagctgggactacaggcacatgccactaagcccagctaatttttgtattgttagtagagacagggtttcaccatattggccaggctggtctcaaactcctgacctcgtgatccacctgccttggcctcccaaagtactgggattacaggcgtgagccaccacgcctggcctctggtgaggatatttatatacataacttcctggagagtaatttagcaatagctatcaaaatatcaaatgcacatgccctttaagaattctaggaatttatcctacggtaaagggcaaaattatttatacacaagcactgttactaatagcaaatgattggaaacaatctaaatatccattcaccaggggactggctaaataagtgatggtacatacgtacaatggaatattataaaatgacagctgtaagaaagaatgaagaagctctctatgtaatgatttcggatgaattacaaaacatattaagtgaaaaaggcaagatacagaatagttactacagtatgctattatttatatttaaaaacttgcaggtatagcaaagaaaatcattggtaattgcttttataagcataaaaattctctggaagggctgggcatggtggctcatgcctgtaatcccagcaccttgggagccaagctgggaggctgcctgaggccaggagcttgagaccagcctgggcaacatagtgagaccctgtctttaaaaaaaatttttaattaaaaaaaaaaattctctgtaaggaaactagtaaatggtagttttttatgtgatcagaagggagcaagacttttcactgtatagttttatacttttttgattatctagctacgtaaaatacagtgttcaaaaattaaatatttttcaagttatagagtgatatatatagtacaaccttaatgttttttttaaaacacataaatacatagaaaaaagcagaaaatatacctcaatgttagagtggtgactatcgcttggtgttgggattatgggtgatatttactttcttctaaagtcttttaggtattttctgaattttcaacaaagaaaatatattacctacattacatattcagaaaaaaaccacagaggtctttttttcattattgatttttttttaattggaccatctatgctgccaagaactagtttcttcttgattgtggcaaaaggaggaatcctttcacttctcctattcagctgagcaatctcaggggctaaatgtctccacatttctaagcaacagaaaagaggctatcaaatatgccttgccttctggaaggactaaaaaggtagcccagatgcagctgtcaagaaaaatgagatccctctaagaatacgatcatgatgttacagctttcctaaggccctgagtgaatttttaaaaatacaattcacattccataacgcatcctcctgagagcccagaggggacatgagcagcatgaatcactgtatcagcccctcctcctgacgagggcacaacacccagaatagctcggtgatgacgcagcagcctgaaacctttgaaagccctcatctttcagagggaggaaatgaaagcgaaaaacaagttcttgacgcagactttaattctcagatctttaccaggcagaacagagcagcaaggaaaccggcacggatcttttgattcttcccactagagcctgcagttgctaaatgtgtgtgtgtccatatgacaaatctgcctgattagctctgcttctgattactaacactactggggttctcaggataggaggcatgtaaaaaaggagagagaaaagataaaataaaaacaaataaaaaaattaaaaatactactgctattttgcagatgatcatatgctttgatatttttcattctgatgaccagatactttcacagatattatcactttttttttttttctgagatggagtttcgctcttgtcacccaggctggagtgcaatggtgcaatctcagctcactgcaacctccacctcccaggttcaagcgattctcctgcctcagcctcccgagtagctgggattacaggcatgcaccaccacgcccggctaattttgtattttcagtagagatggggtttcaccatgttggtcaggctggtcgtaaacttctgacctcaggtgatctgcccgcctcagtctcccaaagcgctgggattacaggcatgagccactgtgcctagccagatattatcactcttaataactataacaagatatgtgaatagtgttttgcatttatcaagcagctttcatttgagattctcattgatttgacttccatttctctttcaggcacagatagtgaaactgtcttgtaatatggttaagtgattactctagatgacagtttaatattagtaacagggccaagagaagaacccatttgctattaggacacaagtacctgacccattgagtggcagtgccactcatctggtagctattttggtcagcagcctgggaaacttgcactgagtttctgtaaaacacactggcaggattcccaagtttctgacttgggagactgagcaggtcaatgccacaaataggaagaagggcaatctcatgagagaacataagtttagttttggtaatgttgtgctcgggcctgaaagacagccagacagtaaggtacaggagacagctaatcttctggatttagagttcagcagagaggtgaacctgctgaaccctgaggtgggggtcatcaatgggtgagtgatcgtgcaatgtgagcagatgaaactgcttcaggaaaatacacagagtaagaagagagaagggcatacggcagaactgcattaaaaaaaattccaggccaggcacggtggctcatgcctgtaatcccagcactttgggaggctgaggtgggcgaatcatgagctcaggagttcaagaccatcctggctaacacggtgaaaccctgtctctactaaaaatacaaaaaaaaattagccgggcgtggtggcgggcgctgtagtcccagctactcgggaggctgaggcaggagaatggcgtaaacccgggaggcagagcttgcagtgagctgagatcacgccactgcactccagcctgggcgacagagcgagactctgtatcaaaaaaaaaagagaatacaaagacaaaagagttatataatttgcccagcaccactcagttaatggtgaagctgagattaaaatgtgagcagtctgattcaaaagtccgtaattttaactgctacgtcactttatttcccatggatgtgagcaatgagtctagattctgatctaggttctaactgactccaaagacttttgtcagtctatgatacaatgttgcctcctcagtcctaggatggtgctttttgctgttttgggtttgctttttttgttgagacagggtctccctctaggctgcagtggcacaatcatagctcactggagcctcaacctcccaggcttaagcaatcttcccagctcagcctccggagtagctgagtctacaggcatgcaccaccatggctggctaagtttttaaattttttacagagatagggatcttgctgtgttgcccaggctggtcttgtattcctggcctcaaatttctagtgatcttcctgcctcaacttcccgaagtgctagaattataggcatgaaccaccacgcgcagccaagtatacacactttaataccaattagttgattagctcttttccaatgtgattactggctgagaataaattctgataaaaaagcaagatgagcttagagttccaggtagttatacgaggccctgacaggggatgacatgagcgagaacacacaattatgcctgtatttgtgaggtctgattttttttttaaataggaggatactaaaccccagtgactcacttgacaactttatccagaaccaaaatgtatttaaaacactgcaaatggagtaactgccaaagagaaagcagaaacctttaagaattattggattctactcatttcaaaactcaaagctgattatagagtttttgaggatataaagaaaaagaaactcggctaggcgcagtggctcacgcctgtcatcccagcactttgggaggtcgaggcaggcggatcatctgaggtcaggagttcgagaccagcctgaccaacatggagaaaccctatctctactaaaaacacaaaactggctgggcgtggtggtgcatgactgtaatcccagctactcgggaggctgaggcaggagaatcgcttgaacccgggaggcagaggctgtggtgagccgagatcgtgccactgcaacacagcctgggcaacaagagcgaaactctatcttgaaaaaaaaaaaaaaagaaaaagaaaaagaaactcaacattaataaagtttatattttaaaaatttaagctacaatcaaactaccattcataagcgtcaacaaggtatctataaagtaaaactcaaagggtattctaaatatgacaatattttataaatagttctcggattgtcctaggatgctaggaggaaaatttaatgagtcattgtgtcctcctcctcttcctcctcatcatagcacatactaggagagctcttcctattctcttaatgctttacataccacaccaaccctagaggtagacagatgctacctcatttcactggtgaggaaactaaggcacaaagaggttaagtattttgcccaaggttacacagctaacacatgaaggagctgaaaactgaatccaggcagtctggctctaccctgagccacagtacctattaactactcgtgtcgtagctaacatgagttaactactaactcttcttttccctagtcacttttatgcctgctagttttcacagatactttgaggataaagtctcactatccttacaaagaaagcacattaattctttcttcccattattaatttgaagtaaagatagtaataacaaaagtctaaatttagggaacaagatgaaaattctaattcaaaaagaatcacaggaagagctgattattttgtctcaggaaagagacgttgattctaattacacgaatcttatcaagcctaagcaattaattatcactagaacacactggcttctagacaaaaggatttcccacagggaagtacttttaatgtcactgagcacatggagtttcatcttttcattcttttgttgttgtgagatacagtctcaccctgtcgctcaggctggagcgcggtggcacggtctcagctcactgcagcctccgcctcccaggttcaagtgattctcctgcctcagccacctgagtagctgggattacaggtgcgcgccaccacgcccggctaatttttgtaattttagtagatacagagtttcaccatgttggccaggctggtcttaaactgatctcaagtgatctgccccacttggtctaccaaagtgctgggattacaggcgtgagccactgtgcctggccaccttctcattctgtagaaacatttcatgcatgaaagtcagaaataagtgaacatatttttgccttggctgtttttcttcctttatcctacctacttctgaaaaaaaccagcatggttttaaaaccaaaactaagattcagaaggaaaagcttcctggctgtggttggctaagactggtcctccaagatgtctacattctaattcctagaacctgggaatgttgccttttatgacaaaagtgactttgcaggtgtgattaaattaaggattttgagatggggcgattatactggattgtccatgtgggcccagtataattgtaagagtccttaagagggaggtaggaatggtcataaggaggggggtaggcaggaatggtccataaggagagaaagggatgtgaaagcagagagggctgggcacggtggctcatgtctataatctcagcactttgggaggctaaggcaggagggtcacttgagaccaagaattcaataccagcctgggcaacatggtgaaatcctgtctctacaaaaaacacaaaaattagccaggtgtggttgcatgtgcccgtagccctagctacttgggaggctgaggtggaaggattgcttgaacccgggaggtcgaggctgcagcgagccatgattttgtcattgcattccagcctgggtgacagagcgagaccccgtctcaaaacacaaacaaacaaacaaagggggcagagagctgggtgcggtggctcacgcctgtaatcccagcactttgggaggccaaggtgggcagatcacaaggtcaggagattgagaccactgagaccatcctggctaacacggtgaaaccccgtctctactaaaaaatagaaaaaattagccgggcctggtggcgggcgcctgtagtcccagctactcgggaggctgagccaggagaatgctgtgaacccgggaggcggagcttgcagtgagccaagatcgcaccaccgcactccagcctgggtgacagagcgagactccgtctcaaaaaaaaaaaggggggggcagagagagatttgaaggtgctatgctgttggctctcaagatggaggaagtggccaagagccaaagaatgcaggaaacctagagaagctggaaaaggcaaggaagtagattctctgtggagcgtccagagggtgtgtggccctgcagacaccttggtttcagccccgtgaaactcattttggacttcgatctcaagaactgtaagatgataaatctgtgttgttttaagccatttagtttgtagttacttgttacagcaacaataggaaagttttaagttgacctaatcttttgttgctgatttgctgtcctacccagtgatttattcattccattaacatctatggtccatcagacacgatgtgaaacgttctgtatattaaaaaaatgaattaagtcacagctgctctcaggagtccacagaccagtggccttcatctcctccctgccaatgcgactgtttcttttcaacaagcgagtcagccaatctggcaaaaaaaggagttctgcatacctggtcacggataagcccgtgatagaggatgctctgcatgtccctgcaaagccgctccaagccaccatacttagaccagacgttggggctgttggttgataccaaaccctccaccgtcgtcttcaaattacccagcaactgccagtgctccctcctgcaagggcatcagttacaccaatcgttagttacctttgctgtacttgatcctgatcatatcaaagaaagtctaagccgaggagcctcctgccccacatcctaacattctctcccctcttaatttttacttgggcacaaaactcaactctgagagaattaaagttgtgaacaatactaatttaaagacaaaaaacaaacagcaaaaaccctcacattcaaatggtagattatgctttgtaaagggattttcatctactatctcactcaatcctcacataagcagcttataaccctaactttataggggtataacccattcagatccatttttattttttgagacacttaactctgtcacccaggctgaagtgtggtggcatgatcacagctcactgtagcctcaacctcccaggtagaggtgatcctcccacctcaacctcccgagtagctgggaactacagatgtgcaccaacacacccagataatttttaaattttttgtagagatggggtctcactatgctgcccaactcctggcctcaagtgatcctcccacctcggcctcccagagagctgggattacagatgtaatccactgcactcagcctaagatccatttcttaacaatgacagtacctgcacaatatacaaaaagatgaaggcatccacacagaaccagacatcttttgccaaacaaaaaaggccaaaaacaacttcttatttcctatatttccaagcgctaactacagcatcgtgaaggacagaaactgtaggactaaggcggtcactaaaatgtcatttatgattataccgtaagaaacggccatcgcagaggccaatggactgccaacttttgcccagtgactctgcatatcctatgcctcttcctcagagcaaactagcctctgatttcttagtgacacagttttcccatgtgccaacaggttacaatccggtctcataggcctgagaatcagtctgactcatgacgtgactctgcatacctgtgttctgattcattctgtactgatcttacaaggttaactgttaaagaacatcatgaggctggacgcagtggctcacacctgtaatcccagcaatttgggaggctgaggcgggtggatcacctgaggtcaggagctagaaaccagcctggccaacatggtgaaaacccatctctaccaaaaaatacaaaaattagccaggcgtggtggcacatgcctgtaatcccagctactcgggagactgagacaggagaatcgcttgaacctgggaagtggaggttgcagtgagctgagatcatgccattgcactccagcctgggcaacaagtgtgagattgtctcaaaaaaaaaaaaaaaaaaaaaagaacatgataaatcccaaaagcaaacattaagtactctatcatcctagggctttgattccaaaattacacaaagagcattgacatcttagaaactttgagcattcagatctacctataatttcctctggacaaagctgaagaatttcccttcctcacaatgaagtgtccctaaggtgccaaagctacaaaagaatgtggcttttattctaagatacaccaaacaatctatatttggtatctgctcatgtagaagaaaacttctgtaaaaaattgatttacatagctaccgtatttagtgtcacctttttaaaaaattttgattgatacataattgtacatattgatagtatacaatggatatattgtgcattgatcgcaacaaagtaattagcatatccatcaccttaaatatttatcatttccctgtgatgagaacattcaaaaacctctcttccagctattctgaactacaccatacactgctgttaaccctcgtcatcttactgtgcaccagaatgtactccttctgtctaactgtctgtccccttggccctgttgaccgatctctctccatgcccttctcccgccttactgtgcaacagagcaccagaacgtactcctcctgcctaactacaaccatgtacctgttgaccaatctctctccatgcccttctccctcctaccctcctcatcctctggcaaccactattccactctctacctccatgagaacaactttttagattaccgagtaatagcatgtgacagctgtctttctgtgcctggcttattgcccttaaggtaacatcctccaggttcacccatgttgccaaaactgaaagaattaaggttgaagtgtattccatagtgtatacacaccccattatctttagccattaatctgttgacggacattttttttttttaagacagactctcactctgtcgcccaggctggagtgcagtggcataatcttggctcactgcaacctctgcctcccaggttcaagcgattctcctgcctcagcctcccgtgtagctgggactacaggcgcaggctaccatgtctggctaatttttgtatttttagttagatggggtttctccatgatggccagactggtctcaaactcctgggctcacatgatctgtgcacctcggcctcccaaagtgctgggattacaggagtgagccaccgcgcctggctgttgatggacatttaagttgatttcataccttggctatcatgaatagcactgcaataaatagaggagtgcaggtatcgctttgatacaccgattgtgtttcccctggatatatactcagtattgggattgcttgatcacacagtagttctatttttaactttttgaggaacctccagactgtgtcgcataatggctgtactaacttacattcccaccagcagcgtgtaagggttcccttttctccccatcctcaccgacaccggctatcttctgatttttttttaatgtgcagcgattagatttggtttgctagtattttgtgaaggatttctgtagctatactcatcgggggtactagcctgtagtttttcctcttgtgcccctctgtagctttggtatcatgataatgttggccttgtagaatgagtttggaggaattctctctccttcgattttgtggaataatttgggaagaattggtattagttcttccttgaagttgtggtagaattcggcagtgacaacatcgggccctgggcttctctttgataggagactcattaccgattccatctcattactcattattggtgtgtccaggttttctgttttgtcatgattcagtgtcggtaagctgtatgtgtccacaaatttcttcacttcttctaggttttccaatttgttggcacagttacccataacagcctctagtgattcttcatagttctgtgctgtcagttgcaatgtctcctttttctctctgattttatttatttgagtcttttttcccccttggtctagctaaaggtttgttaattttatcttctgaaacaaacaactcttttgttaatcttttatatatatattttttcattctctatttcatttatttctgctctgatctttattatttctttccttctactaattctgggtttggtttgtcctggttttctagtttcttgaggtgcaacattaggttgagctctttctactttttgatatagatgttaattgctattttcttccctcttagtactacttttgcagtatcccactgtttttggtatgttgtgtttccactgtcatttgtctcaataaattttctaattccttcttaattcttcattgaccaactggttgttcaggagcatgttgtttaatttccacatatttgtatagtttcctaagttgttcttgttattgatttctagttgtattgcactgtagtcacaaaagatacttgaatggccgggtgcggtggctcatgcctgtaatcccagcactttgggagtccgaggtgggcggatcacttgaggtcaggaggtcaagaccagcctggtcaacatggcgaaaccccatctctactaaaaatacaaaaaaaaattagccaggtgtggtggtgcgtgcatgtaatcccagctacacaggaggctgaggcaggagaattgcttgaacccaggaggcaaaggtggagctgggattgcaccactgcactccagcctgggtgacagagtgagaccccatttcaaaaaaaaaaagaaagaaaaaagaaaaaatacttggtatgatttcagtttttaaaagtttgttgagacctgttttgtggcctaccatatgatatcatatatcctggagatggttccatgtgctgctgagaagaatgtgtatcctgcagctattgagtagaatgttctgtagatgtctgttaggtccatttagtctaggatatagtttaacactgctgtttctttgttgattttctgtctgcatgatctgtccattgctgaaagtggggtatcagagttttcgactgttactgtatcagactttctctccccatctaggtctactaatattcactttacatatttaaggtgctcccatgttggatgcatgcatgcatatatacaggcatccaacatgggagcaccttaatatataaacacacacacacacacaactgttatatccttttgctgaattgactctttatcattacataatgatattgactcttttcacaactttggatttgaagtctattttctctgatataagtatagctactcctgctgtcttttggtttccatttgcatagagcatctttttccatccctttaagtctatgtatgtcctcacatgtgaagtgagattcttggaagcagcatacggttggggcttatttggaaggtttttaaaaattcattgagtcactgtcttttatttggagaatttaacccatttacatttaaggtaattatcgataagtaaggtctgttacttgttttctagtttttttacagttcctttctttctgttactgtcttctgttgtggcacttgattttctctagtagtgtgctttgattccttgcttttcaattttggtgtgtcataggtttttgctttgtagtcagcatgaggcttacaaaacacattttgtagttataaaaagttattttatttatttttaattttcttttttttcttgagacatagtctcactctcacccaggcaggactgcagtagcatgatctcagctcactgcaaccaccatctcctgggttcacccgattctcgtgcctcagcctcctgagtagttggaattagagttacaggcacctgccaccacacccagctaatatttgtatttttagtagagacggggtttcactatgttggccaggccagtctcaaactcttgacctcaagtgacctgcccacctcagcctcccaaagtgctgggattacaggtgtgagccaccatgccaggcccataaaaagttattttaaactgacagtgacttaagtttgatcataaagataggaaaaggaagaaacaaacaaaacctatactttaactccattcctccccaaatctggaatttttgaagtcccattttacatatttttatattgcctatctctttagtgtcttcatctttttaggatcgtttatcctaatgatataattatcaatatcagagagttgaaatactaaattcaactgaagctcatacacactggtttgattaaaccattatgcctgaatcttagatgcaagtaaacagatcacaatggagaaataaaatatcctttcccagccaggcgcagtggctcacgcctgtaatcccagcactttgaggggctgaggcaggcagatcacctgaggtcaggagttcgagaccaacctgaccaacatggaaaaaccccgttctctactaaaaaaatataaaaattagccaggcgtggtggcacatgcctgtaatcccagctactcgagaggctgaggcaggagaattgcttgaacctggggggcggcctaagtggcaagggagagtataacccatccctacataaatcattttcatcaactcacaacgaagccaatctcagaataaaataccaactaccttcttctgggaggatcttgaccacatccctcctttaaagaggaacagaaattgcttaagtgacccaaataagtatatctggggaaaaccagttttcctagatgccaactcagtcttaagctcaccatgttataataagtatgttataataagtaacactcaagattaaagtaaaaagctacaaaactctgtaaagtattacactatataactaatacataactaaaacataatcactaaaaacatgacatgtgagtatcttatatgtgatatatatgaaatatataataaatagtaaataagtgaaagtactatgcaattgcaaagtgtgattcaaggtaagaaatagatactggtctatcttcaatccccaaatactctttttagtggtaaaggaaacagcttcagcttactggcatgtcccttccacagtgagctctttatctgggacaggcccatggatcacagctgaaagtcaggttgtcccaagtcaggtaatgatttgatccccaaagtggaggaagaaagatgtgacatccacatgatggaataccatgaagaatgaaaacttttgaccaaaaagtttctaaagctaattatagcatattaaagtataaaaagcagaatgtaaaattagatttacgatctcaacataaaaatatgaaaagaaataatacgttaatagtggttacctttagtaatatgggggaactgtagagaagagcagaattgtttagggctttcctgagactagcgattaatagaggatcagtagactgggtgtggtggctcacgcctgtaaccccagcactttgggaggctgaggcaggtgcattgcttgagctcaggagttcaagaccagcctggccaacatgcaaaatctcgtctctacaaaaaaactaaaaaaatccctccccacaaagaaaggatcaataatctgaacaaaccagaagctggaaagtaccataaaggatttttaaaatactcagtatcaagggcttcgaagttggaagactgtggtcaggcaagtgtccctgggacttttaatgccagaaagtacttcctggaaagaggtaatgggttcctccttcaggtagaaaaaatataattaagtgaaataattattggtaacactgaggtagcgagagactatcacatgtgtgtttaatgtttcttcttatctggccatatatttgctgtttttaattatctagtatttaacttgcaggctgtgtagttgaatgtgctcctttttacataaataatatgctttaaataaataacatgcttataggaaaaacatacttgactctcttatatagtctctcagctctggggcacctgggagaatgtaaccatcggccagtcccatacatttcatggctgacaggagaatctttttttttttttttttttttttgtagagaccagagtcttactatgttgctgagattggtctcaaactcttgggctcaagcaaccatctgcctcggcctcctaaagtgctaggattacagacgtgagccactgcacgcagccaaaggagaatcttaatgtacaggagggaataagcagtacctgtaggtatgctttgtaattcgacacctatttaacacctgagtaacatcaaatgcattgaatttcaacaatcagtggatttaacatacggatgaaaaatcccttatgtcagaaacctaaccaccaacaaactccttagcatggaggtgaaaaattctccatcattggccccaatctaaataccaactttgctgcccagtactcctcaggttaggtacggggacctcatcacacactattacaaacatgccaacctcactctactgccatgatcttattcatgcagagctctccacctggaatgcctgttctcaccccattcagggattcaggtccagctctaattcaactttctctaaaaaggttctaaataatctgacccactatagctcctttattagaactccaaaagcgtatgatgtcgctataccattccttctaaaaatactttaagactgttgtttaatattacatagcttgtttcctgaaggaaagggactatgtatcttctatttcttttgtattttattttattttattttttatttttatttttattttttgagacggagtctcgctctgtcgcccaggctggagtgcagtggcgtgatctcggttcactgcaagctctgcctcctgggttcacaccattctcctgcctcagcctcccaggtagctgggactacaggtgcccgccaccatgcctggctaattttttgtatttttagtagagacggggtttcactgtgttagccaggatggtctcgatctcctgacctcgtgatccacccgcctcgacctcccaaagtgctgggattacaggcgtgagccaccgcgtccagcctattttatttctgagacagagtctcgctctgtcacccaggctggagggcagtggtgcgatcttggctcactgcaacctctgcctcctgggttcaagcgattctcctgcctcagcctcctgagtagctggggattacaggcacccaccaccaaacccagctaatttttgtattttttagtagagacggggtttcaccatgttggtcaggctggtctcaaactcctgacctcatgatccgcccgcctcagcctcccaaagtgctgggattacagatcttttgtattttaataagcaggaagaaaatgtcacccagtagaaagaaaatagacatcatagtcatttaaactgaatttgaatttgaatcttagctgctcacaaactagatgcacattctatttttttttttttttttgagactgagttttgctctgtcgcccaggctggagggcagtggtgcgatctcagctcactgcaacctccgcctcccgggttcaaatgattctcctgcctcagcctcccaagtagctgagattacaggtgcctgacaccatgcccagctaatttttgtatttttagtagaaatggggtttcaccatgttggccaggctggtctcgaactcttgacttcaagtgatctgcctgcctcagcctcccaaagtgctgggattacaggcgtgagccacctcacctggcctagatccacattcttgaccaagccatttaaactcttgaagcttcaattccctcactgtaaaatggagacaacaattgcttcacagaggagggtgtaactgacaatctaggggaagcattatcatagagcagagaataatattctcttttctctgccattttccccctgtgaacttccattgcataaatctaataaatccaacaaaatcaggaagggtacctagaataaagccttcttacccattctgcttaaaaagaaaattctgccaaaaattgtaaaggattggacagtctgcagcataatgaagtttggttacagtgttccacatccaaacagtatctccactgcgtttaaaccaaggtcaggtctgcaggtaagcatggattgcaaggccctgttgatgctgttggtcctctcactgaagtaggaaagctaggaaggacttcctcaaatactggatatgacttttatatggtaaagacttaaatctgcttgacggaatggaagaaactgtcaaggtgttactgcggcacaataaggctgatttcatgagacatataagaaagacaatcttattacttcaccaggctcatgttatactgtctaggtagcagaatgctttacaaacaaggtaaagcaggcacacaacaccactttaatagcaatggcacgggaggaaagacaaagtgtttcagtcttttcagtttcaggtagatgatttaaaggtaaaaggcacgctgggcacagcggtacatgcctgtagtcccagctcctcaggaggctgaagcaggaggactgcctgacctatgctgggcacagtggcacatgcctgtagtcccagctcctcaggaggctgaagcaggaggactgcctgacctatgctgggcacagtggcacatgcctgtagtcccagctcctcaggaggctgaggcaggaggattgcctgacttcaaaagttcaagtctagcctgggcaacaatgtgagaacccttcaaaaaacaaaaacagctgtggggagaggaaaagcttcaggcttagagtccttgcagtcccctcctgggttctgacaacagcagcttccccaaaagcttcaagggtatgtttctgtaatttttgtactaaaaatcgaactagcaattgctagtttcctttaaaatcatgtgatcatcctgctttgctactagctctatgtaaactgttaactcctagaataatcaaacagggacgggaaagaaagaaaacaggaaatataaaaacgtgaaaaagtgaaaatgaataggagaaatgcgaagaaagtggcacttccaatgacaacagttccactagcatctgcccatctgtaagagggatgaccacaacgttaatgtcttcattcctcaaacaaatattcactgaacaccaactatatgtcaggcactgggctaggcactggtgcttaaagaagcgttatagcggttaaagaggaagagtcccatctgtcagagaattcagaacgtaatgggggaaatggacacttacataaccatgctatgaagggagatgtcagatgtgctctaacagagaggggtgccttctaaaggagcgtcatttaagggacgactaagagctctccaggcaaagagggaggtattgcagtgagtgtagaaaagcaagaatgagaatggcaagaaagatgtgagagtgggtgagtgtgccatggttttgtaattggaaacttcattaagtactaacagaaagattcaggccgggcgcggtggctcacgcctgtaatcccagcactttgggaggccgaggcgggcggatcacgaggtcaggagaatggcgtgaacccgggaggcggagcttgcagtgagccgagattgtgctactgctttctggcctgggcaacagagcgagactccgtctcaaaaaaaaaaaaaaaagattcaataccagggtgaggagttttgacatggaaaatattctgttttcaatgggaaaaccactgaacattgcttttgttttttttgttttgttttgtttgttgtttttgagacggagtctcgctctgtcgcccagcctggagtgcagcggcgcgatctcggctcactacaagttctgcctcccgggctcacgccattctcctgcctcagcctcccaagtagctgggactacaggcgcccgccaccacgcccggctaatttttttgtatttttagtagagacggggtttcaccatgttggccaggatggtctcgatctcctgaccttgtgatccgcctgcctcggcctcccaaagtgctgggattacaggcgtgagccaccgcgtccggcccctgcttttgttttgttctgttttttgagacagtctcgatctgttgcccagggtggagtgcagtggcatcacctgggctcactgcaacctccgcctaccaggttcaagcaattctcctgcctagcctcctgagtagctgggattacaggggtgcacaaccacatctggctaattttttgtatttttagtagagacagcattttgccatgttgaccaggctggtcttgagctcctgacctcaggtgacccacccacctcagcctcccaaagtgctgggatgacaggcatgagccaccaaatccagccaatcactgaacatccctgagtaaaatattatagtagctttgtttctgaaaaattaaactagtagcagggtgagctgggatgacaggcatgagccaccaaatccagccaatcactgaacatccctgagtaaaatattatagtagctttgtttctgaaaaattaaactagtagcagggtgaggctatctggaattgggactaaattcaggttggaagattagttaagaagctactgaggtaatccccaagaagagattatatgggtctacagtgaataaactttatatctgcccagaatttgtccctttattttggtaagagaaccctgattttccactgaggaaccacctctctactacttactctggtccatgaggttccaagatctcaccctcccttaggatccagggttgggcacataacttaggcctgactaagcagaatagcccataccccgaccacaagaacagaaacataactcaagtcagtccaaaaagagtcagccccgggatttttgcttttgctggagctgctgggactgcatctttcttgttgctggtattgctaagcttggagttgctatggtaacctgtagaatagtctacctgagaatgaaaacaacacatctggaagcagagcccagagacagagacaaattcttaatttgaacacccatatttgggcatttctgaagcaacagtacaccctagattttttttttttttttttgagagagaaagtgggaccagggggccatcacgagtgtggatgctgtgccaaggcccggagctctgggagcccacaccatttattgatgatcaaacaaagaaacaggtggtgaggatgtgggggttgaaaggaaacagtgtatcaagtgaatgagaaacatatggctgcttgagataatgggagtgctagaagcaaggagccagcaagtctagcagacatgcaagccctgcatcagcttctctcccaacactcagcttttctcattaaaatatctttttttttcatattttaaaagcatcttttttttttttttttttttttttttttttacagtttcaactatttattcaacaccttagtgaacatctgctcagtgcgggcattattatgtgttaactagaggttttttgtttttgtttttgtttttattgatcattcttgggtgtttctcgcagagggggatttggcagggtcacaggacaatagtggagggaaggtcagcagataaacaagtgaacaaaggtctccggttttcctaggcagaggaccctgcggccttccgcagtgtttgtgtccctgggtacttgagattagggagtggtgatgactcttaaggagcatgctgccttcaagcatctgtttaacaaagcacatcttgcaccaccctcaatccattcaaccctgagtggatacagcacatgtttcagagagcacagggttgggggtaacgtcaccgatcaacaggatcccaaggcagaagaatttttcttagtacagaacaaaatgaaaagtctcccatgtctacctctttccacacagacacggcaaccatccgatttctcaatcttttccccacctttcccccgtttctattctacaaaaccgccattgtcatcatggcccgttctcaatgagctgttgggtacacctcccagacggggtggtggctgggcagaggggctcctcacttcccagtaggcgcgaccgggcagaggcgcccctcacctcccggatggggcggctggccgggcggggcctgacccccccacctccctcccggacggggcggctggccgggcagaggggctcctcacttcccagtaggggcagccgggcagaggcgcccctcacttcccggatggggcgactggccgggcggggggctgacccccccacctccctcccggatggggcggctggccgggcggggggctgacccccccacctccctccgggacagggcggctggccgggcagagtggctcctcacttcccagtcaccctagattttttagtactataagccattatatttggaaatggagagaaaaagaaggcttcaaaagaaaaattaggaacagaattttagaccctggtgactgcttacatatgggaaatagagaagagcgaaatgtcaaatgtcactctgacgctctggcatgttgagtgagtggaaaatgctattaacagagatcagaggaggggcaggttttggtcagtggaataagcttagtttggagatgctaaaacggatcttactccttgaattctgactgtacctggatcacggtgccaggagcactgagcagtacatgtacctgagctgcaagctcagcagtagactgcatggccaaggcagtctagggagacagtacactgcatggccaaggcggtctagggagacagagcaatgccagaaagaccattcctttagcagtttaccagtctagtagtttgggtatttttgagacgagtctcactctgtctcccaggctggagtgcagtggcgtgatctcggctcactgcaagctccgcctcccgggttcacgccattctcctgcctcaacctccccagtagctgggactacaggcgcctgccaccacgcctggctaattttttgtatttttagtagagacggggtttcactgtgttagccaggatggtctcgatctcctgacctcgtgatccacccaccttggcctcccaaagtgttgggattacaggcgtgagccaccgtgcccagtgtagtgtagtagttttaccaggcaacctcaaaataactggcatttaggaaacggagggaaagtgaagtatcatccctaagccccagagcatctggctggagtgatagctagacggaaaacaatagggaagcccatcacctaagcacactaccggggaagtgggaagctaagccaacactctaggtcccaatgtgttcaactcggatgaaggagccactgaaagaggaagaacaagtgatacccttgcaaacagtcacttgtgggggagaccctcgccttatttcaaaaaaactagcaaggggtggattcgacatttttcctacttcctacgtatcaggctctcaggagctttatgcacattgttttattgaatcctcagaacttctcaggcaggaaagcattattcttcctactcaggcaggttacgtaaagtaacttgatcaagttaagccaaattaatccgtgaactaggattcaaatgcaggtctgactttaaagcttattcacgtttcattatatcaactacttaaggaaaatacactgaaaagtttcatccttcatttttaaaatgacactaccggctgggcacagtggctcatgcttgtaatcccagtgctctgggaggccaaggcagcaagatcccttgaggccaggagtttgagactggcctaggcaacatggtgagactctgtcactacaaaaaatctgaaaaaattaaaaattagctgggagtggtggcacacacctgtagtcctagctactgaggaggctgaggtgggaagatcacctgagcccaggagtttgaggctgcagtgagctacgattgcactattgtactccagcctgagtgacacagtgagaccctatctttaaaatatataaataaataaataaaaatgatgctatctcatcaagaagactgtttctgaactgggtatttcattggccatagaaaggttatgtttgcagtaacccagtcacaaagcctcaattaataggcacaaggaatgtgtatttaccagttgtgtatctggagctaaggaggccatcagtaccatgaagcctcattaaacaacgcattctgaattaatcagccgccaacacagtatgcctataacaatgacgggagtgactttgtgaggataaccccactactaaaattaagttttgattaaagttttttggttaagaggcaatcataaaaagaataaaagacgggaaaagattctgcaaaggagctatcctactggcctgaatgacaggcacagaatgctgtgaaatttattcactatcttatacttccgttgttactattagcatagtgagaggcagcatagggtgagtattaaaagtacagactcgggccgggcacggtggttcacgcttgtaatcccagcactttgggaggcggaggctggtagatcctctgaggtcaggagtttgagaccagcctggccaacatggcgaaaccccgtctctactaaaaatacaaaaaattagctgggcgtggtggcgggcacctgtaatcccagctacttgggaggctgaggcaggagaattgtttgaacctgggaggcagaggttgtagtgaagcaagacggtgccactgcactccagccttggcgacagagcaagactctatctcaaaaaaaaaaaaaaaaaagtgcagtctcttgggccggcatggtcgctcatgcctgtaacctcagcacttttgagaggccgaggctggagaatatcttgagcccaggagtttgagaccagcctaggcaacatagtgagaccctgtctaaaaaaagaaaaaaaaaaaaaagcgcagactctggtgccgaactgcctgggtttgaatccagttctgccagggattcgctgtacaaccttggcaagttacttaccctgtccatttctcagctttctcatctgtgacacagcaataacagtagtaccgaccacatacaatagttatagggattaaagaagttaacgcagtattcatatcttaataccttaaaacaattcctggcatgtggtaaatagcatttgttacatacattaaaaaaataactaacccagcctccctcacatgaagtggtagagggaaatcaaaacaatcctaaaacgtgtttagaatttacatgggacctttcacacgaagcacgtcacagacatctgcaggaagaataaatagtcaaataggcaaagcagaaactgaaacatggaaaagggaagtaagatgttcagtttcacttagcacaaatcattctcagatctcaggcaggagccccaaagtcctgtcagtccaggttttgttcaacaggccactttgcacataaaagtagagtcacccttaaaaatagcaagtcttcacccaggaacatctcataaatcttcccttgttgatattttctcagaggtaaatattctgcttctagtttttggatcccagctgctcctgagaccatcattatatctgaaactgtttctaaatgtcaagtgaggtcaggcctggtggctcacacctgttaattccagcactttgggaggccgacgtggcgggggagaattgcttgagcccaggagttagagaccagcctgggcaatatggtgagaccctgtctctacaaaaaagttttttaaagtagccagatgtggtagctggcacctatatccccagctacttgggaagctgagctagtataatcgcttgagcccaagagttggaggctgcagtgagccgtgttcacggcactgcgctcagcctgggggacagggtgaggctgtgtctcaaaaaataaaataaaaataaaataataaatgtcaagtatgactcccttaagccacattcctgctctcgcctgtcagcattccagcctctttaaaaaagattaagaccagagttattaatgaagcaaaccctaaatatggaaggcatctctacagactccgattcatcatttagtcaaagtagttcggggtttctttggctttttgttttttgaagacagggtcttcctctgtcacccaggctggagtgtagtggtgcgatctcggctcaatgcagcctcgacttattggactcaagtgatcctctcgcctcagcctcccgagtagctggcaccacaggtgagcaccaccacgccgagctaatttttgtatttttgtagagacggggatctccctaggttacccaggctggtctcaaactcctggactcaagcgacccgcctcagcctcccccaaggtgctggaattacaggtgtgaggcaccgcacccggtccaaagtagtttttatattttaaatcccccaatttctagaagatatgagctttctgacatggttccatataaataaatgtgaacttgcttagtttgcattgtgaggaaaaagggacaggtttgaagacgaaaaggaaatggcacagaggtcctgccactctctgacagggattcggcaatgacaaagtgcagagtttctggtctcattagcagtccccgccccaccgcactgccatgacactcgctcactttctccccaggctctcctcgccttcatccccatgctcatctctgcctaagcttcttccgaggccactcataacgcttcacctctgctcccaggaattctcacatcctcttcgcgttggccccacttgctgtcacggcaagtttcagtccgggtggtgccctgcccctgtctatagactctggcctgtaaaacctcactgcacccctctggcctcttcgcccagtctctcagctgccacctcctctccagcagtcttggatctgagcttcaccctcctctgctgcccttgccctccgcaaatcccacccaccctcctcaccctaagccggttccttcgtcccatccccgccccgcccgtccttcctctgcgaaatgcttcccaaacaagtcctccgcagccgtcgtcctcaagactcgtcgcgcccggcccttctctccgtgaccccgcgccctcccaagcctcccggggctccggcgcctgtcgctgccccgactccgcggcggctcccagcccacctgctctcctcaggcaggcgctcctcgccgcctccgagctccattcccgcgccctccggccgcatccggggcggtgaggccgcctcttcgcccaagagaggcgtccctgccgcttcgcccttcagggctcccggggccccctggggccggaggaggcacctgcggccggtgggctccgggtgatgcgctacacccgggcggcgacagcgggagggaccgccgcctgggctgcggcttctatcccggccacccccacttccggctccggggactacagcccccggcgagcactccgaggctaggccgctcccgcaggacgcgtcctccaatcccaggccgcgctcgcagaccgcgcccctccaacggcaggccgctcccgcaagccgcgccctccaatcccaggccgctcccgcaggccgcgccctccaatcccaggccgcgctcgtggattactacgcacccggtggttggctgggccggcttgcaagcggcgggggaccttggtctcaggaatccgtgccggggcgtatccttattcacccccgtgacattacacgctggggaccgaactcagtccgagatgtagactaggcaataacgctaatctaatcccggtacgattaaccccactcagcccgccctggcttaatgtccgctggtggtgtttggagacctcgagcatttaaatgaagcgctcacaaacaagagcacaggttgctttgggatcataaaagagcaggagagaaaggcttctgggggctctcggaagatggatgtcaacgcagagttttcaaggctgagtacgggttagccaggagaaagaagagaaggtggagagagcaacacggcagatacaaggaaggaagtgctggcttgggaactgcaggtgctgggtagccagagctgggaaggagtgagcagcagcatggtgtgggcattctggtgtggggaaaccagatcatgaaatgccattttaaggagtttggattttatcctgaaaacaatcagcaaatcaagcatatgcaaatcaagaagtgatttgatcgaatctgatgagaaagccacttttgacaatgtggacaggagatggggcagatataatactatattgaggtaacggtggaaggctagataggagactggtcatccttatgggggataaccaagtaatgctaagaagtgaagcgaaccagttgaaagaaacgtgggcctagggttgccagatactctggtttctcttttttctttttcaaagacggggtctctctctgtcgcccaggctggggtgcagtggcgcaatcatagctccctgcagcctggaactcctgggctcaagcagtcctccttcctcagcctcctgaatagctgggactacaggtgcgagccaccacacctagctatgatattttgattttttaaaagaagctaggatctgcatttttaagcactacttccaaatttttaaacgttggcaacaaattttttaaactttcaactttgcacaggccaaacacagcttgtctgtaggctgaaggtggcccttgagttgctagtttgcaaacccaggcttaaactacagcagcggttgaagagaacaaggaggctcagattacagcaatgtgaaggcaacagaatcagcactactctataaaggactgactgtggcaagtgagggagaaagagcgatcaagaataactccgtgaaaaactaatgactctatattaaaataatatatggcttttaggtattttcaaacttgacaaaagtgttttggcaattaaaaatgaaatgaaagagcctcttgaagccatttatgatttcatttaggttaaaaaaatactctctttcaaactttctcattttcctactaaacgattatacttctttaagaaaggggcaatattactcattgggatttctcttccttctgtgactttcttctcttttggagacgcagtcttgctctgtcacccaggctggggtgcagtagcgctgccacagttcactgcagcctcaacctcctcaagcggatcctctcacctcagcttcccaagtagctgggaccacaggcagtgccactatgcccagctaatttgtttttttttttttaatttttggtagagacagggtctcactgtgctgcctaagctggtctcaaattcctgggctcaagcagtcctcctgcctcagtcacccaaaaagtattgggattacaggcatgaggcaccatacctggccttacttctagttctataaatgtatgaactttattttttggcatacagtataatcccaaattaacactatattatttatttatttatttttgagacagagtttcactcttgttggctagactggagtgcaatggcgcgatcgggttcaagcgattctcctgcctcagcctcctgagcagctgggattacaggcatccgccaccacgcccggctaattttgtattttttagtagggacaaggtttctccatgttggtcaggccggtcttgaactcccgacctcaggtgatccgccggcttcggcctcccaaagtgctgggattacaggcgtactaaaaaatacaaaaaaattagccgggcatggtggcagacgcctgtaatcccagctactcaggaggctgaggcaggagaatggcttgaacccaggaggcagggcttgcagtgagccgagatcgtgctactgcactccagcctgggcgataagagcaagacttcgtctgaaaaaagaaaaaaaaaaaaaggccgggcgtggtggctcatgcctgtaatcccagcactttgggaggtcaaggcgggcagatcacgaggtcaggagatggagactatcctggctgacacggtgaaaccccgtctctactaaaaatacaacaaaaaattagccgggcgtggtggcgggcgcctgtagtcccagctactccggaggctgaggcaggagaatggcgtgatgaacccgggaggcggagcttgcagtgagcagagatcacgccactgcactccagcctggaagacagagctagacctgggcgacagagggagactccgtttcaaaaaaaaaggcaatcagctttatcaggaaatcctaggggccagaagcggtggctcacgcctgtaatctcaacactgggaggcccaggcaggcgggtcacttgacaccaggagttcgaaaccagcctggccaacatagtgaaactctgtctctactaaaaatacaaagaaaaaatagtcgggtgtagtggcacacgcctgtaatcccagctacttgggtggctgaggcatgagaatcgtttgaacccgtgaggtagaggttgcagtgagctgagattgtaccactgcactccaccctgggtgacagagtgagactgtcttggggagaaaaaaaagaaatccaaaaactaaaattgtagcaaaaaggctggaaaacaggctttttctcatatgtccaagttcaagttacatgtactggattttctttaaagccattaataaacatgacaataatctgcactagccatgcgttacctatcccatccctctactttccctcataatcctgaaccccttcttttgtttttttttcttttgagatggagtctcgctctgtcactcaggctggatcatggatccactgaaaatacaaaatacaaaaaattagctgggaatggtggcagacgcctgtaatcccagctactcgggaggctgagccaggagaatctctttaacctgggaggcggaggttgcagtgagctgaggtcatgccattgcactccatcctgggcaacaaggcaagactccatcttaaaaaaaaagaaaaagaaaaagaaattttgtagtataattggcaaaatttgaacatgaaccataattggataatagtacagcatcaatgttaaattttctaaacttggtaattttagcatggttatgttaaggaatatccctagaaatatattctctttcttttttttttgagacagagtcttgctgtgttgcccaggctggagtgcagtggcacaatctcagctcactgcaacctgtgcctcctgggttcaagcaattctcctgcctcagcctcccgagtagctgggattacaggtgcccaacaccacgcccagttagtttttatatttttagtagagacggggtttcatcatgttggccaggctggtctcgaacttctgacctcaagtgacctgcccacctcagcctcccaaagtgctgggattacacgtgtgagccactgcacacagcccttagaaatagattctaaagagtcataattcctgcaactttctctcaaattgtctaacaacaactaatacctctatacagagagaaagcaaatgtggcaaaacattaattggcgaagtagaggatatatgggtattcattgcactatttttgcaacttttctctacatttgcaagtttaaaaaatagtcaaggttctgctttcatggggacctaaaaaaatagtcaatgatcttagtatggttttgttttcttatgactgtatcctgctaaatataacaaaaattttagtgtttcacatggaaatttttaatcttgtaatgattaactttaaagacagtttaaaattaatttatgttttccccataggtagcatttctaaaagtcttttaagccaattttgccaaatgaccaattcactgactttaccaaatttactgatttaccaaaattctttttctgttaggcatatataaagcttatagtagttcatctgatgagatgattttaaaagcttttgaagaattttgccaagttttaattacttagcttttattctgtctttatagcaacatttccatcccctctaagcacttagtagtggttcatttattcaattatataggaactggctgggcacagtggctcatgcctgtaatcccagcaccttgggaggccgaggtgggaggatcacttgaggtcaggagttcaagaacagcctggctaacatggtgaaatcctgtctctactaaaaattcgccaggcatggtggtgggcgcctgtaatcccagctacctgggaggctgaggcaggagaatcccttgaacccaggaggtggacattgcagtgagctgagatcgcaccactgcactccagagattgcaccactgcaacagagcaagactccatctcaaaaaaaaaaaaccccaaaaaactatataggaacacttgccagccacgaacggtggataaaaatgtgtgctttttctttttttttgagacggagtctcgctttgtcacccaggctggagtgcagtggcgcaatcttggctcactgcaacctctgcctcccaggttcaagcgattctcctgcctcagcctcctgagtagctaaaattacgggcgcccgctgccgcctggctaattttttgtatttttagtagagacggggtttcactgtgttagccaggatggtttcgatctcctgacctcatgatctgcccacctcggcctcccaaagaaaatgtgcaatttttaatgttaaaatgaaaattttaaaaatcttatttctaagctgagtgcagtggctcacgcctgtaatagcagcactttaggaggccgaggtgggcggatcgcttgaggtcagaagttcgaggccagcctggccagcatggtgaaaccccatctctactaaaaatacaaaaatcagctgggcttggtggcggacgcctgtaatcccagccacttgggaggctgaggcaggagaatcacctgaacctgggaagcggaggtttcagtgagccgagatcccaccactgcactccagcctgggtgacaaagtgagactgtctcaaaaaaaaaaaatcttatttctagactgagcaaatccttaacatagttgacgaatgttcgttttgtccctgccccagcttcctgcaactctcgctgagtaaagctgcacagaagggaccctccactgcatgaagagggtcagagcttgagtggctgctatgtgcaagacgctgtgctttagttagtctcccccagcctgggctcctcatcccagagcagggaacctgcggggcacagagagaagaagcctgggagaaggaggaatgcctgaagacccgcgacccaagaatcctggctccctgagccttcctggactacaaatccatccagtacaaattgaggatatcttcgaaaaacaaacagttttatgtaaatgggtggaattttgcactttatgtaaatttgtttagctttggaaaatgccacagttggtcattcagtgagtcaatctagaacccctggtggtcaagactcctgccttccctagggagggcaaggcctaataagctgagaggtcccacccctgagtccaggaagaattccccttcaagttcccttgtccacccagagcagattccctagtcacacagaactgatgctcagggacttagtggccagtagtgctcctttaaacttgctagctgaggcgggcaggctcctccggagctcttgagtttcttaagggcagcagctatgcctgcaaccccgtctgtcatgttctctgcagtatccccagcctctagcacagtgtcttgagtttcttaagggcagcagctatgcctgccaccccgtctgtcatgttctctgcggtatccccagcctctagcacagtgtcttgagtttcttaagggcagcagctatgcctgcaaccccgtctgtcatgttctctgcggtatccccagcctctagcacagtgtcttgcacataggaggacctcgaactctgttgaatgaacgaataaatgaacaaacaaattttgagattaaaaggcagaagactagaacaggaaaagtttacaacaaaggaaaagggcaacacagaagagggacagaaagctacagcaaagtggcaaagaaaagctactgcagcagaagacagcagcagacaggtagaatggaaaaaattgaacagaaaagagaagaaaacctgtagtgtatatataagtagtttaagggtgctacgaattagctattgtttattaataactaatattggccaggcgcggtggctcacgcctgtaatcccaaaactttgggaggccgaggtgggtggatcacgaggtcaggagttcaagaccagcctgaccaacatggtgaaaccccgtctctactaaaaatacaaaaattagccgggcgtggtggcgagcgcctgtaatcccagctacttgggaggctgaggcaggagaattgcttgaacccgggaggcggaggttgcagtgagtcaagattgcgccactggactccagcctgggtgacagagtgagactctgtctaaaaaataaataaataaaaaataactaatattagctaataattagttattatacctaatacatattatctatatatcatataatataaattataccatacttctttaatataccagtataatacatattacatcaatatgatttctagatatcctcttttgaaaagcaaaagagttaacataagaaacagacaaatgaattacaagaaaaggaaattacataccagtgtcactcatgaaaagacaaaattcttggcaaaatattagcaagtcaaatccaacaacatgtaaaaaggataatataccatgaccaagtaggtttatcccaaaaatgcaatatttggaacatcaacattcaaaaacaaaatcaacattcaaaatttgatagccaatgtaattcgccatattaatacattttgcaagaaaaaccttttgataatctctagatacagaaaaagcatcagataaaactcagcatttattcatgattaactctcagcaaatcaggagtagaagggaacttcctcaacctaaaaaaaggcatttttaaaaattagcatcatacttaatgttgaaagactgaacgctttccctctggggttgggaacaaggcaaagatgttcactttcactactccaattaaacatgatactagagtccctagtcagtgcaataaggcaagaaaaagaaaaggcatacaaataaaaaacagttatgctatgtgaaataatccagttaaaaagtatatactgtatgattccatttattaaaaatactagaaaatgcaaattaatctacagcaacagaaaacagatcagtagttgcctagatagtaggtggggggtaaggattacaaaggtgagcaagaaaactttagaaaataatgaatatataataatatttattcagattatcgtagtgttttcacaggtatatatcctgtacacctgtataaactgcatactttcagtatgtgtcttttattatcaaatatatctcaaaactaagaaaagggggatttaggctgggcacggtggcttcacacctgtaatcccagcactttgggaggccgaggtgggcagatcacaaagtcaagagatcgagaccatcctggccaacatggtgaaaccccatctctattaaaaatataaaatttagccaggcgtggtggcacgcacctgtagtcccagctactcaggaggctgaggcaggagaattgcttgaacccgggaggcggaggttgcagtgagccgagatcacgccattgcactccagcctgggcaacagagagagatgctgtctcaaaaaaaaaaaaagaaagaaaagaaaagggggatttaaaaggcaaatcaagccaggtgcagtggctcacacctgtaatcccagcactttgggaggctgaggcgggcggattacctgaggtcgggagttcgagaccagcctgaccaacatggtgaaacactgtctctactaaaaatacaaaattagctcagcatggtggcgcatgcctgaaatcccagctacttgggaggctaaggcaggagaatttcttgaatccgggaggcagaggttgtggtgaggtgagatcatgccactgcactccagcctgggcaaaaagagtgaaaatccatctcaaaaaaaaaaaggcaaatcaaactgataaaaagttaaggggtgaagtgtgtaagagtttactacctttgaagaaacatagatttctgtgcacattatgaaaaaggagccagaaagtgttaacagaaaactatgaggttgagctgggcgcggtggctcacacctgtaatgccagcactttgggagtctgagtcgggtggatcacctgaggtcaggagttcgagaccagcctggccaacatagtgaaatgctgtctccactaaaaatacaaaaattagctgggcgtggtgccatgcacctgtaatctcagctataggggaggttgaggaaaagaatagcttaaacccgggaggcggaggttgcagtgagatcatgccactgcactccagcctgggcaacagagtgagactctgtctcaaaaaaggaaagaaagaaagaaaagtatgaggttgagaaggttgccagatttagcaaataaaataaaagactcccagttaaacctgaatttcagttaaacaaatgtcaaccttcaataatgagattcagaaaatatgactaagtataaagtttactgcagcacaaagcttgaggatagccatcgcgaaacatgattccaaaggaatggggtcagtgctccaaagtgaggaggccaagatttcacttatataggcagaaacagttgtaacaatttgattagtttaacttgctacattccaaggaagattcctttaatattctgtgaggaggtgtaatgttctcaggggtcttatctctggcacgcctcaatcattccagatcacttacaggaaaaagcagaagttacaactacatgctgcttgactcatgccatatagccatgtccctctcaaagctcagaataatttaaagtttcaacagctttaagtttgaattattttatttcacacaatgaaatgattctctgttgtaaatatatcctaaatattacatgaaacttactgtagttaaaaaaaaatcactgtttatctgaaacgtgggacatatttgtactaaacaattgtccgttgtttatctgaaattcaaatttagctggccctgcattttatctggcaatcctggaggttgttttatctacattgtgtgaaacgaagtcttttaaaagggcaactgcttggatcccatgtttattttgacttaggcgaagctgtggaactgctgtacaccaacaaaggctgaatgcccacgtccagtccagggccttgttcacagcaggtgctgagatattctttgctcttcaagctgtgtgaagatagggtgtgcatccgtcttgctcactttttttttttttaatccccagggcctattacagtgcctgatgctcaatgaatatatgattaaatgaatagctacctctcctgccccagaaaattgcagggttgaccttttaaccctggcccttgtggttggctgatggacttcttggacaggacccagttccgatttcttggcttgtcttcctctttatttttactgtgtgtgtctcgggttgctattttctgttttgtgtatgaaaagacctgccattacccacaatgcttcactcttgctttcttgcctttccctctggaatctggggatggctcctaggccccaagactctcagcccttggggaaacctgaaagtctgaaacacaacagctaggactgtttaatcaaatactgcagcatggccttttgcactatagagactggggataaggctttggtttgggggagaagatcaggataaaagagaatcttttttttttttttaagacagggtctcacgatgtcgcccaggctggtctcgtactcctgggctcaagtgatccacctgcctcggcctcccaaagtgctgggattacaagcgtgagccactgcaccaggtcgagaatctttattatattagtggtagggaggattttatacatttgggatttttatctgtcctataaatacctgaagtacaaaatgcctccaaactctaattgcattaattttcttccataaaattaagaacttaacctaaggatcctctctgtagtttactctcacaaatgagcagagatggtagaagttatttctagtgacagaaggtgaatgtggagaaaaatgacttgtgcttagaggattttaaatatacttttcatactcactattcttactcctttttctggttttgaagatgggtatgaggtccagagactctcccaaaatcatacagtgaataactaaagtcagtgaaaaagttatcactcaataaaactcaggtctgggcccacaacccagtttctgtagttttttttttttttttatttgagatggagtcttgctgtgtcacccaggctggagtgcaatggcacgatctcagctcactgcaacctccgcctcccgggttcaagcgattctcctgcctcagcctcccaagtagctgagattacaggtgcccaccatcatgcccggctaatttttttatttttttatttatttttattttttagtaggggtttcaccatgttggtcaggctggtctcaaactcctgacctcaggtgatccgcctgcctcggcctcccaaagtgctgggatgacaggcgtgagccagtttctctagtttttagcagtccagacaaatgaaggggcttcagggtgagagagtagtaaaatcaagcacattatgctaaggacatacatgatattctccttgacatgccaaatattgttcttgagtttccgagtccaaactttcctccactattaaagtttcttgtgccccttgataggtgtgtggttcactcttcctatattgttatgtccttgtcatgataaaaaaaaagagacatcttaacctttgagaataagaagttatttagaatattcccaaaagcctaacaaaaatcatacatttccccaagataagactactaggcttacaaaaaagtcatggttctttgagttcagctggaaacataatctgtgtgaagactcctggttttatccatgctacatatacaggaaacgttcacatttacttttattgttaaggtgaccgcaaaattgtcactgcaagctttgctttaaattcaggcctggaaaggggagctggaacagctggctttaatttttaagtgtgacatgcataagaaatattttaaaacatgggatccccaagcaaaaaatagtaaatgtgtcattggtgttgaagttggaagccacatgacattgtgacatgactaaattaagcaaaggctactgtggttttgagatggctggtttccatgctaaaggaatttttgcattttatgaattggagaggagaaaggcgacagagatttctaggtggacagaatgcatctggtattgtccttagatgtaaatatccgagatagttttaagctgtatgagggtgatataacctaaacgcttccacataaacgcagttacttcagggaaggagaatgaggtaagaagagaggtaaataccgtatgttgtaaacggaaaaaagttatcatgcaggaattcatcaaatattaaactgttttcccgtagggatgattaaaaagtaaacgaacccttctatccattcccaatgcaaatgaattagaagaaaatgcagctacatcaacagaggtacttacccctcccgagggaagctgaggtcttattagggtagtgaacaccgtgccagatgttttgagagtgccgattgagagaaggtacagacacgggaaacgttagcatttactttggagttaaggtgacgcaggaaccgtcactgcagcgtttgctttgcgttcagatgcggcagctcagcgcagctgtaggtggaggagcgtgccagggaggggggagctgggatgcagctgcaatctacactcgcaggggtctgtcctgcctcccgaggctgcgttgcggtgggcgcgaaaggctcgtgtgtaccgaagtataggggacctgtctgcagcaggagggactcgaaggacacggaggattatatcactgaaggcataagattcagaggtgcccgcggtctagcatcccccagtttgggcggaaagtcgaactgctcacaacggcggtcctcgcgagcgcctagcacagcggctgcaatgcctcgtccgatcctgcgagggccgctaggagcgagtcacggcgcggggccgctctggtcgcccgcgagtgtcggtggccccgccccgcccgcagccgcgggtggagaccgaggacggcgccggcgcgtgcgcgctccctcggtgcggcgggctgcgtgcgcgagtgggaggtggcaggcctgcgactccggccttgtccgcgcccgctctcggcgcgacgtctccagccatgaaccggtttggtacccggttggtgggagccacggcgacttcttcgccgccgccgaaggcccgcagcaatgaaaacctcgacaaaatagatatgtctttgggtgaggggccgagttggaccgagttggagtgcgggggagggcgcgggtggaagccggcggcgcggtttgtgggggcaggggcggtcggcagcagttgccggcggagttttctcgctggtgggcggacccgagcggaggcccggaggacagccgggagcgcaggctcgacgccaggtgcccggctggaccgcgagggacccgggcgtcccctcggccgcggcagtcggaggaggggctgtggaggcgggggcaggggcgctgcgggcccgaaggttcgcagggtcgcggggggcgtctcttctccccggaggggctacggctcgccgctcgccggctctttgtgaggaaagatctgccggtttccccggagcgcgttcgcggtgggcgttatcggggagcgaggggaatggtccgaccgagccgttctctctgaagaaaggtcttggagagcccggccggggctgcggtcggttaaaccagcgcttccggagctttccctggtcgccgggcgttccaggccggcgccggccatggctgccgggcgcgactctcggggccacctccggccgcggccccggagcgtctgtcagaaaggaagcagcgctcggccgcctgtgggatgtggttgtgtattgagcgctgcctagaaaagcacagtctccctctccaggcctcagagctagctaatgggggagaaagcaaacatctttgaaggagagatgattgctgtggctcgctgagaagccaggtaaagcgtggggttcttgagcgcatctgagagggtggcgtggtttcttgccgattatataaaaaccgggaggttggtgattccattaaaatccagccctgacactaccgaggcaccagccgctgtggttagcttaggtgggctaaaagtacgaatatttttgtcgggattcaagtgatggcgttgggtgtaagtcagctctgccaggtgtttggctggcagtttttcggatatttgaaaagtacctgactagtggattccgaggcgtaccctttcccaggacggtctttagagtgataactgtcttggaaaccttctttcggttttcatttcttcccatttgtcttgtgtgtcttttgttgtggtttatctgga

SEQ ID NO: 528 - DNA, 13111 bp, Homo sapiens
  source 1..13111: mol_type = genomic DNA
ggagggactgaaaagaccaaggttatactaacatcggaatgtgttaatatgctaaaaaattggaaagatacagagaagattagcatggccactgtgcaaggatgacacacaaaaaataattgaaaaaaaaaagtaaaaaataaaaagaccaaggttgaggtcccagaagccaagaattgaggctgaggctgcgtaaatgtaagatcccatgctaggagtcaggatctctcaccagtctccagggtgtcagacaaggctctttcatctcctcttcctccacctgtggtgacagagggtccctgcctgctgaccattttcagatgtgggtgcaaatctgaatcaatgtagagacatcagcaatccactggcagagcatcaggtgaattgagcaggtaggcagagttggagaataggtgtgagtgagtcctgggagggatgttcctaagggcagatggagaaattgggtagaggccctttaataaacacagaaaggctttatgtaggagttgcggattccagcaggtgaaggggaaccctccccccaccccgccccgaaaatcctggaacaggttgaatagaggaacggagcaggtgggagcagggacgtgagaggaataggaggccaagggcggtgggaaaccagactatgccttcatttccccccacccccggggagaagctgcaaccagttttacaggacactcctggccttgcccgagatcaatgaccccattcagagagggttgatggcacaacgcggcaatgccggcagccaaggggttaaccttaggccagctggctctggggtggtgcgagggggtgggccgccaccccctccggttgccttggcaccattgtaggcgcctgctctgctgctgggaacctccgcagagcccaaggcccttcgttgccagtctgctccccactctctgtcccaagtggttccaggcgctgagcccttaggcttcgtctggattcccatcctccaccccaggagaggttggctcggcctggctggtgcaggcgggtccagcccaggcacagacatgcagatgcgcagtctctagggctgctccttagcctcctgggttagcagccgggagccatctgcgctttctcgccgagaaagccgaggctgaacggatagggggcagggaggggacgggggtggggggtgggggtcccggaggtgaagacctcctttcccctggcggcagggggagatcagagacaccacggagcacaggtcagaaacaagggagtagagaggtcggagccagagactcgaggcgaggcgaggcgaggaggagcgaggagtctcgggcccagagtgtgggggtggagggcaggccccctgctcctccttccaatctctgcttctcccgggtaccccctccgccctccgtggggcccgggctctgcccctcccctcagaccctgcaccctctgcggattggtcctcggcctgctggggggcggggcccgagggccctgacgtcactggccgaggggggcgggcggctggaggagggggtgacggggccccggctcagcacctcggagagctccctccccggccttgttttgctctggcatcgccgccgggggagggagcgagggggccgggcaccgggcgcaaaggcagggggatggccatggaagggttgaggggccccgtcggacagagggcccagccgtgatccagcgacgggtttggggctccgggaggggtgggggggcagcgggcggcggcagcagtggccgcacatctggatggaagcgagctttgtccagaccaccatggctctggggctgtcctccaagaaagcgtcctctcgcaacgtggctgtggagcgtaagaacctgatcaccgtgtgcaggtgggcaccgctagtgggcgggggctggggtggtgagggagaggggttggggtggactgcggaaacccggactgagcgctgccgcggagaaaagggaggggagaaaagggtcgagaataatgcgtccactgtccctcccaggcccagaacccagagggaggctgcagtctggtccctacccttctaggccaagccaagcctatgcccgggcctgggcctggggggtgaggggtgtttaattggtactgtagcttcctgtgagaaccaggaagtgacactgtgtgagggggaagggggtggggatggctggctcccttgctgggaatggggcaggatggacagaggggaccccgtggggggatgaatgccctccaagcataccctcattgacacccatgtcaaactgacctctctggggtggggttctccaatgctcagattctggagcagggatgggcagggtcaattgggcatggggtcagagcccatgaatccttccagggaagggtgaggggcaccacccaagacgtgggaaggaccaagagcctgggttccaggttcaaggggagaagatcgggaggacagggccactggtctctgagggtggaacggttgcagggttgggaagattctccgtgattgcggggcccaggaagtgatcctgttcacttcaacctgcagtgactcaccctccctgccctgccctgtcccaaaaccagggcatggccagctgctcagccactccccctgcagcccacacctgcactctcctctggtgctgggatcccctgtcagctgcaacctcccctggcccccatgcctatcaggtgttgccccctcagtgcagggtgctcctgggggcagggctcactcttccctcgccagccccacctgcctgccacataggcctcagctctgctgaagcccacctgatgccctgaggcccactagtgcccacctgatgccctggctcctggctcccatagctccttcccggttcctgggcacgcactccaccacactgcatctgtctcccagcactagtgcccagcacagtgctgtgcacatcagacctctgcagaaatgcctggaactttaaggaaggagagagtgtagcaatggcccagcccacagtgcagggcactgcctttaccctcatttcccccaacccctgccagtgtgttataaaacaaagatttctgtccttggggccagaaggtcctaggttcaagctcttactccatcagctttagctgcgccaccttggggaggtctcttaaccactctgggccttgggtgccccatcatccccattttagatgtcacagccacaccaaagaatgaaaatggcaccatccatgtaggagcctagctcagtgtctggcacacagaaagagccctgtcctaatgacgctcttcctgtccctctctgctgtctacctgctaggttcctctttttctcttgcctgccaaggtagctgagcctcttgagtacatggggggaatgagggaactctccttgacataggccagagaaggagaagttgaagggctgaaggtggtttagagctgggagggaaggatagagttttggggggtcagggacataacaaaggctcagtaacccccaggcccctactgcctcatcactgtcacatggtttgcctccagctcccagaacagctccctttagcaggccatgggctcccctgggccctggcctccctgtctccatggtaacctgcagcagccactgcatctcctatcagggagcacaccacagggctcccgggggcaatgaccacctctgcggcacccctgaggacagataccatatggctgccatgctgaacccagtccaggccccatcatggtctgacccagatgaccaggggaaatcaagctggcaggagggtgcgcatagtgaagctggaataatgccccaaacacaggctggctctcagcagggccagccttcccagccacgaccccgctcctcaccatccctgcccagcggccctaggcacctaccttctcccaaccctgcctgggctctcaaccaaaatgtaatgaggcaggtacgattgttcccatttgcatttgacaagaagggactcacagaggggcccaaggccacgtgagtgccacagggaaacaggatttgaatccagcaggctgcctccctctagtgcaaccccaagactgacctggctctgatctcaaggcagttcaactccaagttcaaaaggaagggggacgagggctcagctgtgcaattggcctgagagcctcagaggtcagtggtccaaggctggagacttgcagagtagaggacaaagggcggtggagcaggggctgctccaggccttggtcatcacaacagctgccaggaggccacagatgtagcagaaagagcagaagcttcagaatcagaatcagacatacctgcttgactactcataagccatgtgactccgaacagatcagtcaacctcttggaccatcaatttctttacctgtaaaatggggatgagagtaatactaagaggacctacctttcagggctgagcatgggtaagggaatgcatgcaaagtactgtgcttgccacattatagggcttgataaatataagaagaaaaggacatttccaagcagctcccatttccctggacaccccgcccctgctctgccacccacagcagggaaatcatgggatgttaggaactgtgtcctcatccctgccctactccattgcagggatggcagggggagattgcaggggtagtgactgcagagggagcctgaggcttagacaggactggagagggggcactgcatggcttcagtccttcagccccacaggcttcccttagtcccttcctcccaaagaagccaggcccccaagccccttccagggatctgctgccaatgccccctcctgcccagtgtctgtgtcaggcccataccccgcacctccccaccccacccccgcccagctctgcactgcctggttctgggcagctggtgtgtgggaggccaagccgggaaggaaaggggggaagggggtatctgtgtactgggagcccacctggccacctgcgcatgcccacactccatgtgcacagtgccaactcacatgccctggtacaggtgacccccatccccaaaagggactgaaggttgctccagcaatcacagaagacagctcaggtggggcacacactggcttctaacacctagttgacccaggcctcgcacacacagaccctgaagggtggtctatggggaaggggctcctggaccgcccccggcttgtgcctcatcttcctattttttcagtccctctcaccccttgctcccgaagcttcctttctctggctgtcacctctcctgtcacccactttgtcaatcagtctcccacctgtcacccttcctccccatctgccaccctctcactccacatgacacggtacctctatggtcactgtagtcttgcctgtctccccactcgctctgccccccaccacatccatgcccttcctgacctttcttctctgccggttgctccctgtctctccctccatcacctgtttcctcacctgacaccccactgccccatctccccacctcgccgcccaggttctctgtgaaaacgctgctggagaagtacacagcggagcccatcgatgactcatcggaggagtttgtcaattttgcagccattttagagcagatcctcagccaccgcttcaaaggtgggcccagcgcccctcccccagcggtccctcccccagcgcccctcccccagtggtccctcccccagcgcccctcccccagcggtccctccccaactcccaacctttagctcccagccacctctttctgatatactccatggactctgaaccccctcattgaccctggcccccattctgggccatgcacagaagcttgtgtacagatctgggaagagggagaggcctttggcctacaatccccatcatgggcaagcgatatgctggggtgcccactgcacacgtgcatgtgtgtgcacagatctttgtgggaggaggctgcttatgcttatgcatgtgagtgcctcactacatggaccctctccaaactccctggtcttgctgagccccctccctgccctggctcagcctgtgccccagcaggtccagtgagctggttcagctcagacgggcagcggggcttttgggactatatccggctggcctgcagcaaagtgcccaacaactgtgtgagcagcatcgagaacatggagaacatcagcacagcccgggccaaggtgaggggcctgaagcaagcaactgctctctgctctggacacagggggcctgcctgtttcttggtttttgccccctgtgcacagcccaggggagaagggcccacacctgatgctggacacatgagtccctctggggcagcaagtaaaggtgaacatgatttccagggccgggcatggatccgggtggcactgatggagaagcgcatgtcagaatacatcaccacggctctgcgtgacacccggaccaccaggtcagacttcccaggcaactcagaccacaggtctcagagtgcacctgcattgcccaaacacagctgatccttaagttcctgcagcatccttcagttcctggactacaagtcccagcaccagcacacatggctgatttccctcttccagcctggcctgcagtcccaggacgaactcttttttttttttttttttttgagaaggagtttcgctcttgttgcccaggctggagtgcgatggcgcgatctcggctcactgcaacctccgcctcctgggttcaagcgattctcctgcctcagcctcctgagtagctgggattacaggcatacgccaccatgcccagctaattttgtatttttagtttctccatgttggtcaggctggtctcaaactcccaacctcaggtgatcctcccgccttggcctcccaaagtgctgggattacaggcatgagccaccgctcctggccccaggacaaacttttaccaccaccaccaccaccacttgcaagtcaaatctaatgcccattatttgccatcaatgcccagcacgctccacccttgcacacctctggatgagcctcagccatgcaccatctcaagtgttggcttgctccatgatctacaacacagcccttctgtctctccaaacaacgaaagcagttctgtacttgctattcacggacacagagtccttatatggggagttcaatccctgcactgtgggttcacagggaggttgggtgcctgaggcaaggggttacaaggaggagtgtgcctgtgtgggcaggtgcatctgaagctgtctgggtgtggcggggggcatatacctccccatcccaattggccatacccagcctgatgtttttactgaattccattcctcagtctacacgtttcaagttaacacgttttttgcgcacctactgtataccaagcactaatgattaagacttgcttcctgatatgaaggatctgggtaacccagtacttgatgaggaaggggtagctcagagggaggagtcggctcagggaacacccattctaggtgatggggccacaggtgcgagccccaggctgaagggggagagaggctccaggcctgcgtgcagatcaggaaggagaattggccttccttcaggatggggtggcagtaagccaacaatagcagctctggggggggggggggcgctccaggggcctgctgcatcctctggccctctgcctccccacagacggttctatgactctggagccatcatgctgcgggatgaagccaccatcctcaccggaatgctgatcggactgagcgccatcgacttcaggtggggtctgcctgacggcagtggtggagggggctgtttcccccataaatgtcctaccccaacccctcacacccacctccaaccctgtggctcctctgcctcagcttctgtctaaagggggaagtcctggacgggaagacccccgtggtcatcgattacacgccctacctaaagttcacgcagaggtgagcggctccatgactgcggcggggcgggggacggggcctcgggacatcctggggacgtcctggtcccaccgccctcagcggccagcgcagacgcgcggggggaggggcgggaccggccgtgcccactgctccctctcccaagctacgactacctgacggacgaggaggagcggcacagcgccgagagcagcacgagcgaggacaactcgcccgagcacccgtacctcccgctcgtcaccgatgaggacagctggtacagcaagtggcacaagatggagcagaagttccgcatcgtctacgcgcagaaggtgcgcgacgccggcgggcccggggggcgggcgggccgggcgggggatccgggcatcccggggcggggcggggatgggggccgcggccgggacgtcctcccagccgcccgggctgagccggcgccccgcagggctacctggaggagctggtgcgtctgcgcgagtcgcagctgaaggacctggaggcggagaaccggcggcttcagctgcagctggaggaggcggcggcgcagaaccagcgcgagaaacgggagctggaaggcgtgatcctggagctgcaggagcagctgtgagcgcacggcctgccctaacccctgacccccgccgccccgaccacatcaccgggtgaaccccatcttcacttccatcgactctaacatcacccgacacgagcacccacctctccagcatcaaccctctgatccagccagccccaccccgagatgcccacaatgatcttctaacattgcccccagcataagatccagtgacttccaacagccagagcccacccttcaccttcagttatcttccgctagagtggccatccaaccttactgcagggaccccacgtcactcacaaggacctgcggtgttgctctgcaaccttcaacacgattgcattcatcgcctcactcacctgcaccacaggctcactgaccgtcatcatccgccgtgacccccgacctcacccctgccgatccctgtaacacttcttctctacgcctttccaccaccctgatcttgcggcaagatccccaagacgatcttacacttcagggattcccacactatcctccactgacgtccccatcaccccagctgaccccaacaacactgcaccattccctccaactcccaatatttgtgcacgaatccctgtcacccctccaccccagtaccacctccacttcctcccgggatctggcccactgaccccaacaccgtatccccatttttgccgctcagatttcattcctgacccctccctcatccccttgctgaatctcccttcctcacttctcctacttccagccaggcctgactcctcctccccctcccaggacaggtctgatccccagtgaccacgcccctctggcccagggttccaaggagctcactacacccctggtcaatcaatggccctcactgggaacgcttaatggggccgagggcgccagcaactccaagctctaccggaggtaagccccagccaggtggggcttgggcctgagagcgggtcgtcctggggaagaagggcttcctctaccggcgcaccagctctcgctctgccgcagacacagcttcatgagcacggagccgctgtcagctgaagccagtctgagctcggactcccagcgcctgggagagggcacgcgggacgaggagccctggggtcccatcggtgagctcccccaacccaacacccagtacccctccagaaagggctgaggcaaggccctgaggcctcaaggcatgtcctcattcattctcttagtcttttttttttttttttttttgagacggagtctcactctgtcatccaagttggagtgcagtggcgcaatctcagctcattgcaacctctgcctcccgggttcaagggattcccttgcctcagcctcccgagtagctgggattaaaagcgcctgccaccacgcgcagctaatttgtgtatttttagtagagacgcgcggctaatttgtgtatttttagtagagacggagtttcgccaggctggtctcgaactcctgacctcaagtgattcacccaccttggcctcccaaagtgctgggattacaggtgtgagccactgtgcccggcctctctcagcctttcttgagggtttagcacagcaatcgagagcttactttgaggtggcagaacacagcatatgcagaacccagcataaatctggctgtgcctcctctgaccatgtgagcttggtcaatcactttacctccatgagtctattctttgtaaatggggatgttgataatcaccaatgttgtcacatggtgagggctcagtggttttttagtgtcatgacatcctcgggggctcacaaactctcggggaactccttagactaatttgctcttatctcatgcacactgtgaactacttgcctgaccattgtttcccccttctctttggctgccaggaagctcagagccaaattagtggctcccttcgagcgaatgcccaggacttcaacgcatgcactttgtgttgacctcatccctggcttcaccttggtttttcccatcctagttctccctatgcctgaatatcctgtcttttcttttttataagcaaccacactgtattggatgaccctagatcttctttgagacaaggcaggctgtggccatgtagccccatcacactgtgtttgtgattgtctgtgtgtctgtctcccccaccagactgtgagctccatgagggcagggaccgtgtcttgtccgttctctgtatccccagtgcttggaacagagcgagtgctcactgtgtatttaataaatggacaaagagagaggatgaccctcacggggagacagagacatcaactgacgattacaatacagtgtccccagcacggtgcctggcacaggcaggtgcttaaccaaagtttaactgaaaatggcaaatgctgtggaatatgccaaggtctcctggggggtgacttgagggctgccccttcactgcccacccctctaccaactcccacacatgtagactggtcgcttggcctcacctgccctctctccccagggaaggaccccacgccctccatgctgggcctctgcggctccctggcctccattcccagctgcaagtccctggcgagcttcaaatccaacgagtgcctggtgagcgacagtcccgagggcagcccagcactgagccccagctgaggaacagcatgggcagtgccagccccacctgccaggggccatggacacctgccacctttcttcaacaagagtcccccaatccaggctacccttccagagaacgctacccacccagccagggttctctcggggaagatctcgtctgctcaccttagctttctgccttggcagcacgggctgcggaagaaagcacgctgggccaggaggcaggggtgcccaagccacagggagcccctggggaagcctgctccattcttctggtgaccttggcgctccttcactcatctcccctgccccctcaggaactggtggcccagcttccacacccccacctcccagtctctagcctctccatctgtctgtgtatggcctggagtcactccttcctcagcccccagggcaagagagctcaaataaaaaccagaggactgagggcagccttgtatgtggggggctggggaagggccccgtcctgaggtctgaaggaagtggagtcagtgcctgaccgaagaccaaggtcaggcagcactagcatgtgccctgtggggacaggcaggccagcactcagggagggggtagcttctgtgtccaaaatattaggtctgcctagggcaggcccaagacatgcaactgccccccaacccaacagcctttaagaacttgctcaaaaccaggctgaggcggccgagcacgccaggggcaggatggaggcacaccctgtagggccagtgccctgtgctggcctcagcaatggtgctttggcccaaagttgcagacccctctgttaggccagagcctggcagttaagcaaccctcactcctctgctgtcgcttaagtgtgcccttaaggagaggtgttaccatcccccattctttttttttgagatggagcctcgctctgttgccaggctggagggcagtggcactatttcagctcactgcaaactccgcttcccaggttcaagggattctcctgcctcagcctcccgagtagctgggactacaggcgcccaccagcatgcccagctaatttttgtattcttagtagagacgaggtttcaccgtgttggctaggatggtctcaatctcctgcccttgtgatccacctgcctcggcctcccaaagtgctgggattacaggcgtgagccaccgtgcccagcccctaccacccccaattctaaccctaacatgggggggaggtccccaaagggacctcaccaccagaatgtctacttgtggtcccttacactctaggtcctcaccccgactctcgccaaactggagaggtcctcttcataggtgccactctgggcagccaaaccagcaccagggtccctcccaagcctccctcccagccaccccaggccccagagggacaggcaccaggcagaagttcatcatctttagacttaaggaattaacaagggtcagggagactacaccaggctgagggcttcttggttcctggagacatgcccagctacagcaaacacagggaaacacgaagggggcagctggaagatttggtcttgaacttggggggtgggtaagtgatgatccccacgactggagcagcaggaagaagttgtgtctgaggaagtgctgggccgcccagagggacagccctgccctggagcttgtcgccgggagggaagggaaacaagccccctccctcagtgctgaggaaaaggcacttggctgggtctcctcctgccctctccccatccgtgggagagacggggtccttgcctccttgcccctttcagccgcccagaagccggtcctggttcagcctctggaagaagcttttgccgaactcataggtgctgatcatgatggcacaggagggggcagccttgatgatccgaggaaggaagcctgcagtggaaaggaggcccgtgtcaggggtcaggtcgcaggtccgccatgccc
